(19) United States
(12) Patent Application Publication
(10) Pub. No.: US 2019/0194756 A1
(43) Pub. Date: Jun. 27, 2019

(54) GENE PANEL SPECIFIC FOR PULMONARY HYPERTENSION AND ITS USES

(71) Applicants: RUPRECHT-KARLS-UNIVERSITÄT HEIDELBERG, HEIDELBERG (DE); THORAXKLINIK-HEIDELBERG GGMBH, HEIDELBERG (DE)

(72) Inventors: EKKEHARD GRÜNIG, SCHRIESHEIM (DE); KATRIN HINDERHOFER, HEIDELBERG (DE); CHRISTINA A. EICHSTAEDT, HEIDELBERG (DE)

(21) Appl. No.: 16/329,528

(22) PCT Filed: Aug. 31, 2017
(86) PCT No.: PCT/EP2017/071886

§ 371 Date: Feb. 28, 2019

(30) Foreign Application Priority Data
Sep. 2, 2016 (EP) 16187084.5

(51) Int. Cl. C12Q 1/6883

(52) U.S. Cl. CPC C12Q 1/6883; C12Q 2600/156

(57) ABSTRACT

The present invention relates to a gene panel of at least 14 genes or the combination of said at least 14 genes for use in a method of diagnosis of a genetic disposition to pulmonary arterial hypertension (PAH) and/or chronic thromboembolic pulmonary hypertension (CTEPH). The present invention relates to using said gene panel or combination of genes in the in vitro or ex vivo diagnosis of a genetic disposition to pulmonary arterial hypertension (PAH) and/or chronic thromboembolic pulmonary hypertension (CTEPH). The present invention relates to a method and a kit for the diagnosis of a genetic disposition to pulmonary arterial hypertension (PAH) and/or chronic thromboembolic pulmonary hypertension (CTEPH). The present invention further relates to said gene panel, method and kit with respect to a genetic disposition to pulmonary veno-occlusive disease (PVOD) and/or hereditary haemorrhagic telangiectasia (HHT).

[0001] The present invention relates to a gene panel of at least 14 genes or the combination of said at least 14 genes for use in a method of diagnosis of a genetic disposition to pulmonary arterial hypertension (PAH) and/or chronic thromboembolic pulmonary hypertension (CTEPH). The present invention relates to using said gene panel or combination of genes in the in vitro or ex vivo diagnosis of a genetic disposition to pulmonary arterial hypertension (PAH) and/or chronic thromboembolic pulmonary hypertension (CTEPH). The present invention relates to a method and a kit for the diagnosis of a genetic disposition to pulmonary arterial hypertension (PAH) and/or chronic thromboembolic pulmonary hypertension (CTEPH). The present invention further relates to said gene panel, method and kit with respect to a genetic disposition to pulmonary veno-occlusive disease (PVOD) and/or hereditary haemorrhagic telangiectasia (HHT).

### BACKGROUND OF THE INVENTION

[0002] Pulmonary arterial hypertension (PAH) is characterised by plexiform lesions of the small pulmonary arteries leading to an increase in pulmonary vascular resistance and right heart failure (Galiè et al., 2016; Grünig et al., 2011). The recent decade witnessed the discovery of hereditary predisposition to PAH. In 2000, mutations in the bone morphogenic protein receptor type 2 (BMPR2) gene, a member of the transforming growth factor-beta (TGF-β) super family, have been identified in families with autosomal dominantly inherited PAH (hereditary PAH, HPAH) (see e.g. Deng et al., 2000; Grünig et al., 2000; Lane et al., 2000). Defects of the BMPR2 gene have been detected to be the major heritable cause for development of PAH (Machado et al., 2015; Soubrier et al., 2013) albeit having an incomplete penetrance of about 20-40% (Larkin et al., 2012; Sztrymf et al., 2007) in single families up to 50% (Newman et al., 2001; Frydman et al., 2012). In approximately 85% of familial PAH and 14-35% of sporadic idiopathic PAH (IPAH) cases, mutations of BMPR2 gene were identified (Soubrier et al., 2013; Pfarr et al., 2011; Kabata et al., 2013; Girerd et al., 2016). In PAH patients with hereditary haemorrhagic telangiectasia (HHT) mutations in the activin receptor-like kinase 1 (ALK1 or ACVRL1) (Trembath et al., 2001) and endoglin (ENG) (Chaouat et al., 2004; Harrison et al., 2003) gene were documented. Therefore, diagnostic genetic testing within the last decade has concentrated on these 3 genes and is usually performed by direct Sanger sequencing in a sequential manner, terminating the sequencing as soon as a mutation has been identified in one of these genes. However, within the last years further genes belonging to the BMPR2/Alk1-signalling pathway have been detected by whole exome next generation sequencing (NGS) to be involved in the pathogenesis of PAH and/or pulmonary veno-occlusive disease (PVOD) and/or hereditary haemorrhagic telangiectasia (HHT). HHT often lead to pulmonary arterial hypertension which drastically worsens patients' survival (Lyle et al., 2016). In hereditary PVOD cases 100% of hereditary patients carried two mutations in the gene EIF2AK4 (Girerd et al., 2016). The ERS/ESC guidelines thus suggest a mutation analysis to be preferred to a biopsy to ascertain the diagnosis of PVOD (Galiè et al., 2016).

[0003] Recently mutations and large deletions were also discovered in the three major genes BMPR2, ENG and ALK1 in patients with chronic thromboembolic pulmonary hypertension (CTEPH) (Feng et al., 2014, Xi et al., 2016). Therefore, it is likely that genetic defects also play a role in the manifestation of CTEPH.

[0004] The availability of genetic testing including genetic counselling has become more and more important for patient care and for family members of PAH patients. Therefore, genetic testing and counselling has been addressed and recommended in the new European Respiratory Society/ European Society of Cardiology (ERS/ESC)-guidelines for selected PAH patients and their family member (Galiè et al., 2016). The most common molecular approach is genetic testing by Sanger technique of only 3 genes. This might no longer be appropriate, since today at least 14 PAH/CTEPH/PVOD/HHT genes are known and the Sanger technique assessing one gene at a time is a very time consuming and expensive method (at least 11 h analysis time—in reality 1-2 weeks turnaround time for the three major genes). Furthermore, there is growing evidence that in some patients at least 2 gene defects are necessary for disease manifestation (second hit hypothesis) (Eichstaedt et al., 2016; Rodriguez Viales et al., 2015; Wang et al., 2014).

[0005] There is a need in the art for improved means and methods for diagnosing PAH/CTEPH and screening of PAH/CTEPH, including PVOD and/or HHT.

### SUMMARY OF THE INVENTION

[0006] According to the present invention this object is solved by providing a gene panel or combination of genes comprising at least the genes with the nucleotide sequence of SEQ ID Nos. 1 to 14 for use in a method of diagnosis of a genetic disposition to pulmonary arterial hypertension (PAH) and/or chronic thromboembolic pulmonary hypertension (CTEPH).

[0007] According to the present invention this object is solved by using a gene panel or combination of genes comprising at least the genes with the nucleotide sequence of SEQ ID Nos. 1 to 14 in the in vitro or ex vivo diagnosis of a genetic disposition to pulmonary arterial hypertension (PAH) and/or chronic thromboembolic pulmonary hypertension (CTEPH).

[0008] According to the present invention this object is solved by a method for the diagnosis of genetic defects in pulmonary arterial hypertension (PAH) and/or chronic thromboembolic pulmonary hypertension (CTEPH), comprising the following steps:
[0009] (a) providing at least one sample,
   [0010] preferably at least two samples,
[0011] (b) extracting the genomic DNA from said sample(s),
[0012] (c) determining whether at least one mutation in terms of one or more altered base pairs, smaller and larger deletions or insertions in the genes with the nucleotide sequence of SEQ ID Nos. 1 to 14 is present by using next generation sequencing,
   [0013] wherein the presence of said at least one such mutation is a genetic confirmation of existing PAH or indicative for the increased probability for PAH/CTEPH to manifest in not yet affected relatives of PAH/CTEPH patients, and
[0014] (d) optionally, determining whether detected mutations/gene variants have pathological consequences either predicted with in silico prediction programmes and/or functional studies
   wherein the sample(s) is/are patient sample(s) or sample(s) from a relative of a PAH patient.

[0015] According to the present invention this object is solved by providing a kit for the diagnosis of genetic defects in pulmonary arterial hypertension (PAH) and/or chronic thromboembolic pulmonary hypertension (CTEPH), comprising
[0016] (i) means for carrying out next generation sequencing and detecting at least one mutation in twins of one or more altered base pairs, smaller and larger deletions or insertions in the genes with the nucleotide sequence of SEQ ID Nos. 1 to 14,
[0017] (ii) optionally, means for processing genomic DNA,
[0018] (iii) optionally, means for carrying out an additional sequencing, preferably Sanger sequencing, or an analysis technique, preferably multiplex ligation-dependent probe amplification or quantitative polymerase chain reaction.

### DESCRIPTION OF THE PREFERRED EMBODIMENTS OF THE INVENTION

[0019] Before the present invention is described in more detail below, it is to be understood that this invention is not limited to the particular methodology, protocols and reagents described herein as these may vary. It is also to be understood that the terminology used herein is for the purpose of describing particular embodiments only, and is not intended to limit the scope of the present invention which will be limited only by the appended claims. Unless defined otherwise, all technical and scientific terms used herein have the same meanings as commonly understood by one of ordinary skill in the art. For the purpose of the present invention, all references cited herein are incorporated by reference in their entireties.

[0020] Concentrations, amounts, and other numerical data may be expressed or presented herein in a range format. It is to be understood that such a range format is used merely for convenience and brevity and thus should be interpreted flexibly to include not only the numerical values explicitly recited as the limits of the range, but also to include all the individual numerical values or sub-ranges encompassed within that range as if each numerical value and sub-range is explicitly recited. As an illustration, a numerical range of “1 to 96” or “2 to 96” should be interpreted to include not only the explicitly recited values of 1 to 96, but also include individual values and sub-ranges within the indicated range. Thus, included in this numerical range are individual values such as 1, 2, 3, 4, 5 . . . 91, 92, 93, 94, 95, 96 and sub-ranges such as from 2 to 10, 15 to 50, 1 to 90, etc. This same principle applies to ranges reciting only one numerical value, such as “at least 2”. Furthermore, such an interpretation should apply regardless of the breadth of the range or the characteristics being described.

### Use of the PAH-Specific Panel

[0021] In this disclosure we disclose the development of a PAH/CTEPH-specific gene diagnostic panel using NGS and including 14 known PAH and further candidate genes. The new procedure is widely available, easy to perform and will allow assessing up to 50 genes and up to 96 patients at once in a short time at reduced costs. Furthermore, it is possible to assess sensitivity and specificity of this new panel in a cohort of patients/family members using additional Sanger sequencing.

[0022] Preferably, the use comprises the in vitro or ex vivo diagnosis of a genetic disposition to pulmonary veno-occlusive disease (PVOD) and/or hereditary haemorrhagic telangiectasia (HHT).

[0023] The terms “PAH/CTEPH” or “PAH/CTEPH/PVOD/HHT”, such as when referring to gene(s) and/or patient(s), are used interchangeably throughout the specification.

[0024] As discussed above, the present invention provides a gene panel or combination of genes comprising at least the genes with the nucleotide sequence of SEQ ID Nos. 1 to 14 for use in a method of diagnosis of pulmonary arterial hypertension (PAH) and/or chronic thromboembolic pulmonary hypertension (CTEPH), in particular the diagnosis of a genetic predisposition to PAH and/or CTEPH.

[0025] As discussed above, the present invention provides the use of a gene panel or combination of genes comprising at least the genes with the nucleotide sequence of SEQ ID Nos. 1 to 14 in the in vitro or ex vivo diagnosis of pulmonary arterial hypertension (PAH) and/or chronic thromboembolic pulmonary hypertension (CTEPH), in particular the diagnosis of a genetic predisposition to PAH and/or CTEPH.

[0026] Preferably, the present invention provides the use of the gene panel or combination of genes in the in vitro or ex vivo diagnosis of pulmonary arterial hypertension (PAH), chronic thromboembolic pulmonary hypertension (CTEPH), pulmonary veno-occlusive disease (PVOD) and/or hereditary haemorrhagic telangiectasia (HHT), in particular the diagnosis of a genetic predisposition to PAH and/or CTEPH and/or PVOD and/or HHT.

[0027] In a preferred embodiment, the gene panel or combination of genes of the present invention is used which comprises the at least 14 genes with the nucleotide sequence of SEQ ID Nos. 1 to 14 and up to the 50 genes, wherein said 50 genes comprise the genes with the nucleotide sequence of SEQ ID Nos. 1 to 43.

[0028] In a preferred embodiment, the gene panel or combination of genes comprises the at least the genes with the nucleotide sequence of SEQ ID Nos. 1 to 14 and 42.

[0029] Preferably a range of at least 14 genes and up to 50 genes are used. In one embodiment 15 genes are used, in one embodiment 36 genes are used, in one embodiment 43 genes are used.

[0030] In a preferred embodiment, the gene panel or combination of genes is used which comprises at least the genes with the nucleotide sequence of SEQ ID Nos. 1 to 14 and 42, more preferably comprises the genes with the nucleotide sequence of SEQ ID Nos. 1 to 36, more preferably comprises the genes with the nucleotide sequence of SEQ ID Nos. 1 to 43.

[0031] The term “gene panel” or “combination of genes” or “gene set” or “set of genes” refers to the genes included on the panel which are either genes identified as mutated in PAH, CTEPH, PVOD and/or HHT patients or such genes which have been associated with PH in animal models and might contribute to disease manifestation in case of a genetic defect.

[0032] The inventors have found that the following set of 14 genes allows for the diagnosis of genetic defects of PAH and partly CTEPH, PVOD and/or HHT:

| Gene | Ensemble Gene ID | SEQ ID NO. |
|---|---|---|
| ACVLR1 | ENSG00000139567 | 1 |
| (ALK1) | | |
| BMPR1B | ENSG00000138696 | 2 |
| BMPR2 | ENSG00000204217 | 3 |
| (+promoter) | | |
| CAV1 | ENSG00000105974 | 4 |
| EIF2AK4 | ENSG00000128829 | 5 |
| ENG | ENSG00000106991 | 6 |
| GDF2 | ENSG00000263761 | 7 |
| KCNA5 | ENSG00000130037 | 8 |
| KCNK3 | ENSG00000171303 | 9 |
| KLF2 | ENSG00000127528 | 10 |
| SMAD1 | ENSG00000170365 | 11 |
| SMAD4 | ENSG00000141646 | 12 |
| SMAD9 | ENSG00000120693 | 13 |
| TOPBP1 | ENSG00000163781 | 14 |

[0033] Mutations in these 14 genes or “core genes” have been shown to lead to PAH manifestation and partly to CTEPH, PVOD and/or HHT manifestation.

[0034] The genes ACVRL1, BMRP2, ENG (SEQ ID NOs. 1, 3, 6) have been found to be mutated in CTEPH.

[0035] The gene EIF2AK4 (SEQ ID NO 5) has been shown to be mutated in PVOD.

[0036] The genes ACVRL1, BMPR2, ENG, GDF2, SMAD4 (SEQ ID NOs. 1, 3, 6, 7, 12) have been shown to be mutated in HHT.

[0037] The inventors have found that the following set of 15 genes further allows for the diagnosis of genetic defects of PAH and partly CTEPH, PVOD and/or HHT:

| Gene | Ensemble Gene ID | SEQ ID NO. |
|---|---|---|
| ACVLR1 | ENSG00000139567 | 1 |
| (ALK1) | | |
| BMPR1B | ENSG00000138696 | 2 |
| BMPR2 | ENSG00000204217 | 3 |
| (+promoter) | | |
| CAV1 | ENSG00000105974 | 4 |
| EIF2AK4 | ENSG00000128829 | 5 |
| ENG | ENSG00000106991 | 6 |
| GDF2 | ENSG00000263761 | 7 |
| KCNA5 | ENSG00000130037 | 8 |
| KCNK3 | ENSG00000171303 | 9 |
| KLF2 | ENSG00000127528 | 10 |
| SMAD1 | ENSG00000170365 | 11 |
| SMAD4 | ENSG00000141646 | 12 |
| SMAD9 | ENSG00000120693 | 13 |
| TOPBP1 | ENSG00000163781 | 14 |
| TBX4 | ENSG00000121075 | 42 |

[0038] Within the last years genes belonging to the BMPR2/Alk1-signalling pathway have been detected by whole exome next generation sequencing (NGS) to be involved in the pathogenesis of PAH, pulmonary veno-occlusive disease (PVOD) and/or HHT. In hereditary PVOD cases 100% of hereditary patients carried two mutations of the gene EIF2AK4 (Girerd et al., 2016). The ERS/ESC guidelines thus suggest a mutation analysis to be preferred to a biopsy to ascertain the diagnosis of PVOD (Galiè et al., 2016). Defects in genes apart from BMPR2 leading to PAH manifestation have been described so far in 0.5-4% of PAH patients (Machado et al., 2015; Soubrier et al., 2013). A mutation in the gene KLF2 has been shown by the inventors to cause hereditary PAH (HPAH) (Eichstaedt et al., 2017) and mutations in the gene TBX4 have been identified in several cases of paediatric PAH, idiopathic PAH (IPAH) and HPAH (Levy et al., 2016). Moreover, mutations in two additional genes are now considered responsible for the onset of HHT: the bone morphogenic protein 9 (BMP9 or GDF2) (Wooderchak et al., 2013) and the SMAD Family member 4 (SMAD4) (Toning et al., 2014). HHT often lead to pulmonary arterial hypertension which drastically worsens patients' survival (Lyle et al., 2016).

[0039] The inventors have further found that the following set of 43 genes, which comprise the 14 “core genes” (in grey), as well as the set of 15 genes, and further genes are even more preferred for the diagnosis of a genetic predisposition to PAH, PVOD, HHT and partly CTEPH:

[0040] The genes ACVRJ, BMP2, BMPR1A, ID1, ID2, ID3, ID4, SMAD5, SMAD6, and SMAD7 (SEQ ID NOs. 15-17, 21-24, 29-31) are part of the BMPR2 pathway.

[0041] As discussed above, the genes ACVRL1, BMRP2, ENG (SEQ ID NOs. 1, 3, 6) have been found to be mutated in CTEPH.

[0042] As discussed above, the gene EIF2AK4 (SEQ ID NO 5) has been shown to be mutated in PVOD.

[0043] As discussed above, the genes ACVRL1, BMPR2, ENG, GDF2, SMAD4 (SEQ ID NOs. 1, 3, 6, 7, 12) have been shown to be mutated in HHT.

[0044] The genes CREB1, FOXO1, HRG, IL6, KLF4, KL5, VCAN, and ZFYVE16 (SEQ ID NOs. 18-20, 25-27, 34, 36) are known from PAH animal models.

[0045] The gene NOTCH3 (SEQ ID NO. 28) is involved in pediatric PAH manifestation.

[0046] The gene SOD2 (SEQ ID NO. 32) is known from a PH animal model and is epigenetically changed in PAH patients and PH animal model.

[0047] The gene THBS1 (SEQ ID NO. 33) is involved in hereditary PAH (HPAH) manifestation.

[0048] The gene VHL (SEQ ID NO. 35) is known from a PH animal model and involved in Chuvash-associated PAH (Chuvash-APAH) manifestation.

[0049] The gene BTNL2 (SEQ ID NO. 37) is involved in sarcoidosis associated PAH.

[0050] The gene CYP1B1 (SEQ ID NO. 38) has a decreased expression in BMPR2 mutation carriers.

[0051] The gene EPAS1 (SEQ ID NO. 39) is involved in HPAH manifestation and is associated with erythrocytosis.

[0052] The gene JAK2 (SEQ ID NO. 40) is involved in myeloproliferative disease (MDS) and chronic thromboembolic pulmonary hypertension (CTEPH).

[0053] The genes TBX2 and TBX4 (SEQ ID Nos. 41-42) are involved in pediatric PAH manifestation associated with microcephaly thyroid and sensorineural abnormalities or small patella syndrome.

[0054] The gene TMEM70 (SEQ ID NO. 43) is involved in persistent neonatal PAH with ATPase synthase deficiency.

[0055] In one embodiment the following set of 36 genes, which comprise the 14 “core genes” (in grey) and further genes are preferred for the diagnosis of a genetic predisposition to PAH and partly CTEPH, PVOD and/or HHT:

[0056] The diagnosis of genetic defects/a genetic predisposition comprises sequencing of target genomic regions of the genes of the gene panel, which can be the exons (preferably all the exons), exon-intron boundaries of the genes, and/or base pairs at the 5′ and 3′ untranslated region (UTR).

[0057] Said sequencing is preferably carried out or comprises next generation sequencing.

[0058] “Next generation sequencing” refers to high-throughput sequencing based on different technologies, which enable the generation of a great amount of sequence data in a short time frame opposed to the conventional, slower and more expensive direct Sanger sequencing.

[0059] Next-generation sequencing (NGS), also known as high-throughput sequencing, include e.g. the following sequencing technologies:
[0060] Illumina (Solexa) sequencing
[0061] Roche 454 sequencing
[0062] Ion torrent: Proton/PGM sequencing
[0063] SOLiD sequencing

[0064] These recent technologies allow to sequence DNA and RNA more quickly and cheaply than the previously used Sanger sequencing.

[0065] In one embodiment, the diagnosis optionally further comprises an additional sequencing, preferably Sanger sequencing, or an analysis technique, preferably multiplex ligation-dependent probe amplification (MLPA) or quantitative polymerase chain reaction (quantitative PCR).

[0066] In embodiments where large(r) deletions or insertions in the PAH/CTEPH genes are determined, an additional analysis technique (such as MLPA or quantitative PCR) is useful for confirmation.

[0067] The sample(s) is/are patient sample(s) or sample(s) from a relative of a PAH/CTEPH patient or a PAH/CTEPH/PVOD/HHT patient, respectively.

[0068] The terms “PAH/CTEPH patient” and “PAH/CTEPH/PVOD/HHT patient” are used interchangeably throughout the specification.

[0069] In one embodiment, at least two (patient) samples are tested simultaneously. A (patient) sample is preferably whole blood, peripheral blood or tissue.

[0070] In further embodiments a higher number of (patient) samples are tested, such as up to e.g. 48 samples, 96 samples or up to 384 samples. The number of samples depends also on the type of sample plate used as well as on the type of sequencer.

[0071] The gene panel or combination of genes of the present invention can preferably be used for diagnostic genetic testing in subjects, preferably in PAH/CTEPH/PVOD/HHT patients and/or its family members.

[0072] Said diagnosis includes determining whether one mutation in the respective genes is present or a second mutation in terms of one or more altered base pairs, smaller and larger deletions or insertions, wherein said mutation(s) is/are genetic confirmation of manifest or existing PAH or indicative for the increased probability for PAH/CTEPH/PVOD/HHT to occur or manifest in not yet affected family members of PAH/CTEPH/PVOD/HHT patients. Patients with mutations have been shown to have more severe symptoms and shorter survival (Evans et al., 2016), and thus these patients may be checked on their clinical symptoms in shorter intervals and their family members may be invited for genetic counselling and testing.

[0073] The gene panel or combination of genes of the present invention can preferably be used for screening of newborns, such as of babies/newborns of patients with PAH/CTEPH/PVOD/HHT or their family members, but also in a general newborn screening. The early detection of mutations may enable an early diagnosis and treatment as soon as symptoms occur.

[0074] The gene panel or combination of genes of the present invention can preferably be used for pre-implantation diagnostics, as currently offered in e.g. France (Girerd et al., 2015). In particular in families, in which the disease penetrance is high, i.e. in which many mutation carriers develop the disease, pre-implanation diagnostics may be applied within the legal framework.

### Diagnosis Methods

[0075] As discussed above, the present invention provides a method for the diagnosis pulmonary arterial hypertension (PAH) and/or chronic thromboembolic pulmonary hypertension (CTEPH), in particular for the diagnosis of genetic defects in PAH and/or CTEPH.

[0076] Preferably, the diagnosis of genetic defects in pulmonary arterial hypertension comprises the diagnosis for pulmonary veno-occlusive disease (PVOD) and/or hereditary haemorrhagic telangiectasia (HHT).

[0077] Said method comprises the following steps:
[0078] (a) providing at least one sample, preferably at least two, preferably up to 96 samples,
[0079] (b) extracting the genomic DNA from said sample(s),
[0080] (c) determining whether at least one mutation in teams of one or more altered base pairs, smaller and larger deletions or insertions in the genes with the nucleotide sequence of SEQ ID Nos. 1 to 14 is present by using next generation sequencing,
   [0081] wherein the presence of said at least one such mutation is a genetic confirmation of existing PAH/CTEPH or indicative for the increased probability for PAH/CTEPH to manifest in not yet affected relatives of PAH/CTEPH patients,
[0082] and
[0083] (d) optionally, determining whether detected mutations/gene variants have pathological consequences either predicted with in silico prediction programmes and/or functional studies.

[0084] The sample(s) provided in step (a) is/are patient sample(s) or sample(s) from a relative of a PAH/CTEPH patient or a PAH/CTEPH/PVOD/HHT patient, respectively. Preferably, the (patient) sample is whole blood, peripheral blood or tissue.

[0085] As discussed above, the terms “PAH/CTEPH patient” and “PAH/CTEPH/PVOD/HHT patient” are used interchangeably throughout the specification.

[0086] In one embodiment, in step (c) the presence of at least one mutation in terms of one or more altered base pairs, smaller and larger deletions or insertions in the 14 genes with the nucleotide sequence of SEQ ID Nos. 1 to 14 and in up to 50 genes is determined, wherein said 50 genes comprise the genes with the nucleotide sequence of SEQ ID Nos. 1 to 43. Preferably, a range of at least 14 genes and up to 50 genes are used. In one embodiment 15 genes are used, in one embodiment 36 genes are used, in one embodiment 43 genes are used.

[0087] In a preferred embodiment, in step (c) the presence of at least one mutation in terms of one or more altered base pairs, smaller and larger deletions or insertions in the genes with the nucleotide sequence of SEQ ID Nos. 1 to 14 and 42.

[0088] In one embodiment, in step (c) the presence of at least one mutation in terms of one or more altered base pairs, smaller and larger deletions or insertions in the genes with the nucleotide sequence of SEQ ID Nos. 1 to 36 is determined.

[0089] In a preferred embodiment, in step (c) the presence of at least one mutation in terms of one or more altered base pairs, smaller and larger deletions or insertions in the genes with the nucleotide sequence of SEQ ID Nos. 1 to 43 is determined.

[0090] In one embodiment, the presence of at least two mutations in terms of one or more altered base pairs, smaller and larger deletions or insertions is indicative for the existence of PAH or the increased probability for PAH to become manifest.

[0091] In one embodiment, in step (b) the genomic DNA is extracted from peripheral blood using procedures known in the art.

[0092] Preferably, at least two (patient) samples are tested simultaneously. In further embodiments a higher number of (patient) samples are tested, such as up to e.g. 48 samples, 96 samples or up to 384 samples. The number of samples depends also on the type of sample plate used as well as on the type of sequencer.

[0093] The genomic DNA can be tagged, such as with a barcode. The DNA of each patient/each subject can be tagged differently allowing multiple samples to be tested in parallel/simultaneously.

[0094] The genomic DNA can be digested e.g. with restriction enzymes and the desired genes can be captured by 50 to 500 bp biotinylated probes annealing to the respective genomic sequence. The pull-down of desired fragments can be achieved via biotin-streptavidin beads. The fragments can be amplified via PCR and loaded onto a sequencer for sequencing.

[0095] In one embodiment, the method comprises the further step of
[0096] (d) carrying out an additional sequencing,
   preferably Sanger sequencing,
   [0097] or an analysis technique,
   preferably multiplex ligation-dependent probe amplification or quantitative polymerase chain reaction.

[0098] In embodiments where large(r) deletions or insertions in the PAH/CTEPH/PVOD/HHT genes are determined, an additional analysis technique (such as MLPA or quantitative PCR) is useful for confirmation.

[0099] In one embodiment, the method is used for
[0100] diagnostic genetic testing in subjects, preferably in PAH/CTEPH/PVOD/HHT patients and/or its family members;
[0101] screening of newborns; and/or
[0102] pre-implantation diagnostics;

### Diagnostic PAH Kit

[0103] As discussed above, the present invention provides a kit for the diagnosis of pulmonary arterial hypertension (PAH) and/or chronic thromboembolic pulmonary hypertension (CTEPH), in particular for the diagnosis for a genetic predisposition to PAH and/or CTEPH.

[0104] Preferably, the diagnosis of genetic defects in pulmonary arterial hypertension comprises the diagnosis for pulmonary veno-occlusive disease (PVOD) and/or hereditary haemorrhagic telangiectasia (HHT).

[0105] Said kit comprises
[0106] (i) means for carrying out next generation sequencing and detecting at least one mutation in terms of one or more altered base pairs, smaller and larger deletions or insertions in the genes with the nucleotide sequence of SEQ ID Nos. 1 to 14.

[0107] In one embodiment, the means (i) are means for carrying out next generation sequencing and detecting at least one such mutation in the genes with the nucleotide sequence of SEQ ID Nos. 1 to 14 and 42.

[0108] In one embodiment, the means (i) are means for carrying out next generation sequencing and detecting at least one such mutation in the genes with the nucleotide sequence of SEQ ID Nos. 1 to 36, preferably in the genes with the nucleotide sequence of SEQ ID Nos. 1 to 43.

[0109] Said means comprise probes suitable for sequencing target genomic regions of the respective genes and for determining whether at least one such mutation in said genes is present.

[0110] Said target genomic regions can be the exons (preferably all the exons), exon-intron boundaries of the genes, and/or base pairs at the 5′ and 3′ untranslated region (UTR).

[0111] Said probes can have a length of 50 to 500 nucleotides. Said probes can be labelled, such as via biotin, and/or fluorophores.

[0112] Said means can, for example, be designed and generated using HaloPlex technology or SureSelectXT technology (Agilent Technologies, Santa Clara, USA) or using the in silico tool SureDesign (Agilent Technologies, Santa Clara, USA).

[0113] Said kit can optionally further comprise
[0114] (ii) means for processing the genomic DNA.

[0115] Said processing means can be for tagging, digesting, capturing etc.

[0116] The genomic DNA can be tagged, such as with a barcode. The DNA of each patient can be tagged differently allowing multiple samples to be tested in parallel/simultaneously.

[0117] The genomic DNA can be digested with e.g. restriction enzymes and the desired genes can be captured by 50 to 500 bp biotinylated probed annealing to the respective genomic sequence. The pull-down of desired fragments can be achieved e.g. via biotin-streptavidin beads.

[0118] The fragments can be amplified via PCR and loaded onto a sequencer for sequencing.

[0119] Said kit optionally further comprises
[0120] (iii) means for carrying out an additional sequencing,
   [0121] preferably Sanger sequencing,
   [0122] or for carrying out an analysis technique,
   [0123] preferably multiplex ligation-dependent probe amplification or quantitative polymerase chain reaction.

[0124] Said means (iii), for example, comprise dNTPs, polymerases, buffer, magnesium chloride, specific primers and probes.

[0125] In embodiments where large(r) deletions or insertions in the PAH/CTEPH/PVOD/HHT genes are determined, an additional analysis technique (such as MLPA or quantitative PCR) is useful for confirmation.

### Preferred Embodiments

### Abstract

[0126] In this study we developed a new specific gene panel for pulmonary arterial hypertension (PAH), chronic thromboembolic pulmonary hypertension (CTEPH), pulmonary veno-occlusive disease (PVOD) and hereditary haemorrhagic telangiectasia (HHT) including major disease genes and further candidates. The new PAH-specific gene panel developed in this study allowed for the first time the assessment of all known PAH genes and further candidates at once and markedly reduced overall sequencing time and costs. Sensitivity and specificity reached 100% when Sanger technique was additionally applied. Thus, this technique will potentially change the routine diagnostic genetic testing in PAH patients.

### Discussion

[0127] We developed a PAH/CTEPH/PVOD/HHT-specific gene panel based on NGS and tested sensitivity and specificity including 43 PAH/CTEPH/PVOD/HHT genes and candidates in up to 96 patients and family members. A pilot study, including 29 genes, revealed BMPR2, ALK1, ENG and EIF2AK4 mutations in 59% of patients and documented a 100% sensitivity and 100% specificity of the panel, when Sanger technique was additionally applied in a “two step” procedure. The study showed that mutations in “new” genes such as EIF2AK4 could be frequently detected in PAH patients which would have been overlooked by the commonly used standard procedure addressing the 3 major PAH/CTEPH/PVOD/HHT genes (BMPR2, ALK1, ENG) only. Therefore, this technique will completely change the usual molecular diagnostic approach. NGS enables the screening of many genomic regions at once, Sanger sequencing of the pathologic variants as second step enables a 100% specificity.

[0128] Very recently another study was published by Piao and colleagues (2016) investigating mutations in 22 PAH associated genes in a cohort of IPAH/HPAH patients. They could only identify mutations in the genes BMPR2 and ALK1 in 25% of the patients. No mutations in other candidate genes were uncovered. While 11 genes overlapped with our panel we also present data for 34 distinct candidate genes. EIF2AK4 was not sequenced by Piao et al. and thus potential mutations might have been overlooked. This exemplifies how crucial the selection of candidate genes is to detect PAH causing mutations.

### Technical Advantages of the New PAH/CTEPH-Specific Gene Panel as Diagnostic Tool

[0129] The PAH/CTEPH-specific gene panel is much more time and cost efficient than the conventional Sanger sequencing. The time per patient can be drastically reduced even further with different hardware analysing up to 96 patients at once. The number of genes could be increased up to 50, albeit lowering the average coverage of analysed genes.

[0130] The newly developed panel generates results for all genes in the same process. In contrast, Sanger sequencing is performed sequentially, one gene at a time. Hence, Sanger sequencing would be terminated as soon as a single mutation was identified excluding the possibility of detecting additional mutations as second hits (Rodriguez Viales et al., 2015). Therefore, a similar NGS panel approach is already in use for common diseases such as familiar breast and ovarian cancer (Schroeder et al., 2015).

[0131] Alternatively to Sanger technique whole exome NGS has been previously applied in PAH patients and detected 4 new PAH genes: the membrane protein caveolin-1 (Austin et al., 2012), the potassium channel KCNK3, the translation factor EIF2AK4 and the topoisomerase binding protein TOPBP1 (de Jesus Perez et al., 2014). However, whole exome NGS requires such an enormous amount of work (approximately several months to identify putative PAH genes in one patient) in teams of bioinformatics analyses, data processing and storage that this technique is currently no option for the routine diagnostic setting. It is only feasible for scientific use.

### Further Methodological Considerations

[0132] Additional 5 candidate genes identified with conventional methods included BMPR1B (Chida et al., 2012), KCNA5 (Remillard et al., 2007), SMAD1 (Nasim et al., 2008), SMAD4 (Nasim et al., 2008) and SMAD9 (Shintani et al., 2009). These genes represent the most promising candidates to be mutated in IPAH/HPAH patients with no mutations in BMPR2, ENG or ALK1 (Kwapiszweska et al, 2014). Hence, a targeted screening of all of these genes increases the probability of a disease causing mutation to be detected. Moreover, the continuous inclusion of putative candidate genes in the same panel will advance our knowledge of the PAH aetiology and highlight new genes involved in disease manifestation. The new PAH/CTEPH/PVOD/HHT-specific gene panel presented in this application will allow to better identify additional mutations, acting as modifiers for disease manifestation.

[0133] Genetic assessment might receive a more prominent role within the actual and future diagnostic algorithm as indicated in the new ESC/ERS-guidelines and may even be useful for risk stratification. At the same time, the use of the PAH/CTEPH/PVOD/HHT-specific gene panel diagnostic requires a more comprehensive genetic counselling before and after the molecular analysis, since more genes are analysed and variants of unknown significance will also have to be explained. Once mutations have been identified in PAH/CTEPH/PVOD/HHT patients the genetic assessment and counselling of family members is furthermore complicated by the yet unknown penetrance of mutations in less common PAH genes (Girerd et al., 2016).

### Mutations and Variants of Uncertain Significance

[0134] Both newly identified heterozygous mutations of the pilot study were located within EIF2AK4. Mutations in EIF2AK4 have been previously described in families with PVOD (Eyries et al., 2014) and pulmonary capillary haemangiomatosis (Best et al., 2014). Whereas we included one patient with PVOD this patient showed no mutation or variant in EIF2AK4 but a BMPR2 mutation. Recently, mutations in EIF2AK4 were also identified in 5 families of an Iberian population suffering from an aggressive form of HPAH (Tenorio et al., 2014) and two additional families (Gomez et al., 2015). Thus, this is the third study reporting mutations of EIF2AK4 in I/HPAH-patients.

[0135] Twelve variants were classified as variants of unknown significance in a pilot study analysing a subset of 29 genes in 37 patients and 5 family members of other PAH patients since not all in silico prediction programmes characterised them as “pathogenic” and/or they were present in a public database. Nevertheless, variants, which were classified as “pathogenic” by at least one prediction programme and are absent in non-PAH patients, represent interesting follow-up candidates for functional studies such as the variants in exon 23 of EIF2AK4, in exon 3 of SMAD7 or in SMAD6 exon 4. Due to the low frequency of PAH in the population (15:1,000,000) already two individuals with the same variant in the public ExAC database rise the population frequency of the variant above 0.0015%, the conservative cut-off expected for mutations causing PAH (Machado et al., 2015). Considering this level, a variant at a frequency of 0.0016%, which occurs in two individuals in the database, such as the variant in exon 3 of the VCAN gene might still represent an interesting follow-up candidate.

### Conclusions

[0136] The new approach of a panel diagnostic including a vast array of PAH/CTEPH/PVOD/HHT associated genes has shown to have a high sensitivity and specificity together with confirmatory Sanger sequencing. In already a small subset of patients two mutations in EIF2AK4 were identified, which would have not been detected with the previous routine procedure. Therefore, for patients and for practitioners this approach offers a comprehensive, cost and time efficient way to investigate genetic influences of PAH/CTEPH/PVOD/HHT and can be continuously adapted to include newly detected causative PAH/CTEPH/PVOD/HHT genes.

### Further Preferred Embodiments

[0137] 1) The inventors have found evidence that in some patients at least 2 gene defects are necessary for disease manifestation (second hit hypothesis) (Eichstaedt et al., 2016; Rodriguez Viales et al., 2015).

### Abstract

[0138] Mutations in the EIF2AK4 gene have recently been identified in recessively inherited VOD. In this study we assessed if EIF2AK4 mutations occur also in a family with autosomal dominantly inherited pulmonary arterial hypertension (HPAH) and incomplete penetrance of BMPR2 mutations.

[0139] Clinical examinations in a family with 10 members included physical examination, electrocardiogram, (stress)-echocardiography and lung function. Manifest PAH was confirmed by right heart catheterisation in three affected subjects. Genetic analysis was performed using a new PAH-specific gene panel analysis with next generation sequencing of all known PAH and further candidate genes. Identified variants were confirmed by Sanger sequencing.

[0140] All living family members with manifest HPAH carried two pathogenic heterozygous mutations: a frame shift mutation in the BMPR2 gene and a novel splice site mutation in the EIF2AK4 gene. Two family members who carried the BMPR2 mutation only did not develop manifest HPAH.

[0141] This is the first study suggesting that EIF2AK4 can also contribute to autosomal dominantly inherited HPAH. Up to now it has only been identified in a recessive form of HPAH. Only those family members with a co-occurrence of two mutations developed manifest HPAH. Thus, the EIF2AK4 and BMRPR2 mutations support the “second hit” hypothesis explaining the variable penetrance of HPAH in this family. Hence, the assessment of all known PAH genes in families with a known mutation might assist in predictions about the clinical manifestation in so far non-affected mutation carriers.

### Discussion

[0142] This is the first report of an autosomal dominantly inherited EIF2AK4 mutation as second hit in a family with HPAH and known BMPR2 mutation. Only those family members with a co-occurrence of a mutation in BMPR2 and EIF2AK4 were clinically affected and developed manifest HPAH, whereas carriers of the BMPR2 mutation only had no symptoms of PAH. Thus, the results of this study offer an explanation for the reduced penetrance of the disease in this family and show that EIF2AK4 may play a role also in families with autosomal dominantly inherited PAH.

### EIF2AK4 Mutation in Autosomal Dominant HPAH

[0143] EIF2AK4 was first described in the autosomal recessively inherited pulmonary veno-occlusive disease (PVOD) (Eyries et al., 2014) and pulmonary capillary haemangiomatosis (Best et al., 2014). Recently a single recessively inherited EIF2AK4 mutation (c.3344C>T, p.(P115L)) was repeatedly identified in six consanguineous HPAH families with autosomal recessive mode of inheritance (Gomez et al., 2014; Tenorio et al., 20105). Only homozygous mutation carriers developed the disease plus a single heterozygous carrier of a distinct EIF2AK4 mutation, in whom the authors suspected a second non-identified mutation in the same gene (Gomez et al., 2015). Therefore, up to now EIF2AK4 mutations have been believed to be a very rare in HPAH. Apart from the mentioned family we were able to identify a nonsense mutation in exon 8 in the EIF2AK4 gene in another PAH patient with sporadic IPAH who had no other mutation in known candidate genes (data not shown). Thus, this gene might be more often affected than initially thought and contributes to the disease in an autosomal dominant manner. In contrast, BMPR2 mutations occur in up to 85% of familial cases and are autosomal dominantly inherited (Machado et al., 2015; Pfarr et al., 2011). However, many BMPR2 gene carriers have no clinical symptoms and do not develop manifest PH even during a more than 10 year follow-up period (Hinderhofer et al., 2014). Hence, the family described here provides an explanation for the decreased penetrance and suggests an autosomal dominantly contribution of EIF2AK4 to disease manifestation.

### EIF2AK4 Mutation as “Second Hit” May Explain Variable Penetrance

[0144] Up to date only four families with second hits have been described (Rodriguez Viales et al., 2015; Wang et al., 2014). This might be due to the fact that usually only 3 genes (BMPR2, ACVRL1, ENG) are analyzed routinely in PAH patients in a sequential processes, i.e. if one mutation is discovered the other genes are not assessed. Thus, second hit mutations might be overlooked in general in the current routine diagnostic setting and particularly in genes such as EIF2AK4, which are usually not included in the diagnostic analysis.

[0145] While second hits are still rarely described in PAH this model is often found in other diseases such as the nephrotic syndrome or the long QT-syndrome. At the same time the decreased penetrance in PAH is an acknowledged pattern. Thus, second hits or modifier genes might be more common in PAH than known to date. We therefore contrast two genetic models: Firstly, we propose the “second hit model” to explain the low disease penetrance in PAH. In this model a single mutation in each gene on its own has a very low penetrance. Two mutations however, lead to a synergistic effect resulting in a high disease penetrance. The second model is the “single gene model”, representing the classical view for PAH suggesting BMPR2 mutations alone are responsible for disease manifestation. Under this assumption, the EIF2AK4 mutation would randomly occur in this family and not impact PAH manifestation. In the latter model the penetrance for the BMPR2 variant must be moderate, since 4 (obligate) carriers of the mutation did not develop PAH up to ages 31, 37, 49 and 59.

[0146] Considering both models, it is significantly unlikely that both mutations in two known PAH genes occurred by chance in this family. Moreover, the EIF2AK4 mutation clearly co-segregates with the disease in BMPR2 positive family members suggesting a second hit model.

[0147] We have not observed an EIF2AK4 mutation alone within this family, albeit in a different IPAH patient (data not shown) indicating at least a low penetrance to be present. Disease severity might moreover be influenced by the location of the respective mutations within the protein and thus their variable impact on protein function (Machado et al., 2015). Therefore, we hypothesize according to the second hit model the penetrance to be intermediate if only BMPR2 was positive, very low if only EIF2AK4 was positive, and very high if EIF2AK4 and BMPR2 each harbor a mutation.

### Loss of Protein Function by EIF2AK4 Mutation

[0148] The gene EIF2AK4 encodes a kinase termed general control nonderepressable 2 (GCN2) which phosphorylates the eukaryotic translation initiation factor 2α leading to a global down regulation of protein synthesis in response to amino acid starvation, hypoxia and viral infection but the up-regulation of specific stress response proteins (Montani et al., 2016). Gene expression is increased in smooth muscle cells in the vessel wall and interstitial tissue (Eyries et al., 2014). While the gene function has been studied a clear link to PVOD or PAH still remains to be detected. However, an interaction between EIF2AK4 and the BMPR2 pathway genes SMAD1, SMAD4, ACVRL1 and ENG has been observed (Barrios-Rodiles et al., 2005; Eyries et al., 2014). Thus, an impaired functioning of both, BMPR2 and GCN2 (EIF2AK4), might potentiate its effect on the transcription of target genes of the BMPR2 pathway.

[0149] The EIF2AK4 mutation of this family leads to the loss of a splice site and subsequently the loss of exon 38, presumably a frame shift and premature stop codon. In the last exons of the functional gene (31-39) lies the ribosomal binding domain and the dimerisation domain between amino acids 1396-1643 (Padayana et al., 2005). The last 51 amino acids of this domain were missing or partly exchanged by wrong amino acids in the affected members of this HPAH family. The domain is essential to recruit ribosomes for protein synthesis (Narasimhan et al., 2004), thus a partial deletion will at least moderately affect protein-ribosome binding if not fully impair it. Moreover, in the same region the dimerisation domain is located. This facilitates the formation of a homodimer (2 EIF2AK4 proteins bind to each other) and thus a functional protein (Narasimhan et al., 2004). The formation of homodimers has been shown to be conserved in mice and yeast (He et al., 2014). Single amino acid substitutions in the C-terminal domain in yeast already led to an inability of the protein to dimerise and to be functionally active (Narasimhan et al., 2004). The gene sequence of the C-terminal domain is highly conserved from mice to mammals suggesting corresponding functional impairments in humans (Berlanga et al., 1999). A total deletion of this region in our HPAH family thus likely leads to a loss of function in the mutated gene.

### Conclusions

[0150] We were able to show EIF2AK4 contributes to disease manifestation in this HPAH family in an autosomal dominant manner. We report a new mutation within EIF2AK4 leading to HPAH as a second hit together with a mutation in BMPR2 providing an explanation for the observed penetrance in this family. Only those family members with a co-occurrence of two mutations developed manifest HPAH. The occurrence of several mutations in PAR associated genes might be more frequent than initially thought. Thus, a simultaneous assessment of all PAH associated genes in more patients might shed light on the long standing question surrounding the reduced penetrance.

[0151] 2) A mutation in the gene KLF2 has been shown by the inventors to cause hereditary PAH (HPAH) (Eichstaedt et al., 2017).

### Abstract

[0152] Heritable pulmonary arterial hypertension (HPAH) is an autosomal dominantly inherited disease caused by mutations in the BMPR2 gene and/or genes of its signalling pathway in approximately 85% of patients. We clinically and genetically analysed an HPAH family without mutations in previously described PAH genes. Clinical assessment included electrocardiogram, lung function, blood gas analysis, chest X-ray, laboratory testing, echocardiography and right heart catheterization in case of suspected disease. Genetic diagnostics were performed using a PAH-specific gene panel including all known 12 PAH genes and 20 further candidate genes by next-generation sequencing (NGS). HPAH was invasively confirmed in two sisters and their father who died aged 32 years. No signs of HPAH were detected in five first-degree family members. Both sisters were lung transplanted and remained stable during a follow-up of >20 years. We detected a novel missense mutation in the Krüppel-like factor 2 (KLF2) likely leading to a disruption of gene function. The same KLF2 mutation has been described as a recurrent somatic mutation in B-cell lymphoma. Neither the healthy family members carried the mutation nor >120000 controls. These findings point to KLF2 as a new PAH gene.

### Discussion

[0153] In this study we detected a novel germline mutation in the KLF2 gene likely causing autosomal inherited HPAH in a family with three affected patients, a follow-up of >20 and no mutations in any of the previously described 12 PAH genes. The identification of KLF2 as potential PAH gene will generate new insights into the pathogenesis of the disease since it regulates pathways which have been shown to be involved in PAH development such as cell proliferation, inflammation and vasodilation.

### Is the KLF2 Gene Mutation Disease Causing in this Family?

[0154] KLF2 is a promising PAH gene, as Krüppel-like factors play an important role in many cellular functions which are also involved in the disease aetiology of HPAH. The pathogenicity of the detected KLF2 mutation was supported by several levels of evidence. Firstly, the functional spectrum of the KLF2 transcription factor, in particular its implication in endothelial activation and proliferation (Bhattacharya et al., 2005) and regulation of vasotonus points to an involvement in the development of PAH. Since KLF2 is able to inhibit a driver of endothelial cell proliferation, the VEGF receptor 2 (Bhattacharya et al., 2005), mutations which impair KLF2 functioning, may also lead to an increased cell proliferation. Similarly, functional KLF2 downregulates vasoconstrictors such as endothelin-1 and upregulates vasodilators such as eNOS (Dekker et al., 2005). Hence, a disturbance in this regulation is likely increasing vascular tonus, which is also observed in PAH.

[0155] Secondly, the mutation is significantly associated with PAH and co-segregated with the disease in our family. It has not been described before in PAH and was absent in unaffected family members as well as more than 120,000 controls.

[0156] Thirdly, the same mutation has been identified in splenic marginal zone lymphoma (Clipson et al., 2015) and functional studies clearly indicated a displacement from the nucleus and reduced transcriptional activity (Piva et al., 2015). The lymphoma-associated mutations have been identified as somatic mutations, whereas the presumption in this study is that the KLF2 mutation is a germline event and thus present during development. This is a critical distinction, as homozygous germline deletion of KLF2 in mice has been published to be embryonic lethal or at least very deleterious to normal embryonic development (Yeo et al., 2014). The mechanism of embryonic lethality relates in part to loss of vascular integrity, lending some additional biological plausibility to KLF2 as a PAH-related gene. However, the published data suggest a specific activity of the mutant that is strongly reduced compared to the wild-type (Piva et al., 2015). This would fit with an incompletely penetrant, embryonically viable mutation that nonetheless manifests in disease. Thus, considering all evidence it is highly likely that the KLF2 mutation in this family led to PAH manifestation.

### KLF2 Gene is Linked to the BMPR2-Signalling

[0157] A closer review of KLF2 functionality and cellular localisation revealed a tight connection to the BMPR2 signalling pathway (FIG. 3). We summarised interactions of KLF2 and important pathway members such as BMPs and apelin regulating vasodilation and cell proliferation known from the literature illustrating its role in this signalling network. KLF2 is not only upregulated by laminar blood flow in the pulmonary arteries but also by the BMPR2 ligand BMP4 and apelin, a small molecule acting as a vasodilator (Kim 2014). The functional BMPR2-apelin-KLF2 signalling axis leads to vasodilation by activating eNOS (SenBanerjee et al., 2004). Reduced apelin serum levels were identified in IPAH patients in comparison to controls (Chandra et al., 2011). Thus, an imbalance of the BMPR2-apelin-KLF2 axis might contribute to dysfunctional endothelial and smooth muscle cells which are observed in PAH. This offers a possible explanation for the development of HPAH in the described family.

### Conclusion

[0158] The findings of this study highlight for the first time KLF2 as a potential PAH gene. KLF2 functions are closely tied to the disease aetiology of PAH as it regulates vasotonus, cell proliferation and endothelial activation and the gene is linked to the BMPR2 pathway.

[0159] The following examples and drawings illustrate the present invention without, however, limiting the same thereto.

### BRIEF DESCRIPTION OF THE DRAWINGS

[0160] FIG. 1. Two step sequencing procedure of the PAH specific gene panel diagnostic.

(A) In the first step the panel is designed in silico. The customised panel is manufactured and the desired PAH/CTEPH/PVOD/HHT genes are extracted from DNA of PAH/CTEPH patients and family members. PAH/CTEPH/PVOD/HHT genes from each patient are enriched leading to a high coverage of the regions of interest allowing 100% sensitivity to detect all true positive variants. Samples are pooled and loaded together onto a next generation sequencer.
(B) Resulting data is passed through quality control, the reads are aligned to a reference sequence and any variant from polymorphisms to mutations is identified. These variants are assessed regarding their clinical significance with comparative data bases and in silico prediction programs. To eliminate false positives direct Sanger sequencing is applied in a second sequencing step reaching 100% specificity.

[0161] FIG. 2. Effect of the EIF2AK4 mutation c.4892G>T on cDNA level.

Next to the ladder the affected individual 11:4 shows a heterozygous PCR product for the cDNA of EIF2AK4 exons 36-39. The upper band shows the wildtype sequence (266 bp) while the lower band shows a product without exon 38 (147 bp). The healthy family member III:4 is homozygous for the wild type PCR product indicating no loss of exon 38.

[0162] FIG. 3. KLF2 as part of the BMPR2 signalling pathway.

KLF2 is upregulated by laminar blood flow, apelin and the bone morphogenic protein 4 (BMP4), which binds to the dimerised BMP receptor 2 (BMPR2) and the activin receptor like kinase (ALK or ACVRL1). Signals are transduced via the adenosine monophosphate kinase (AMPK), the mitogen activated protein kinase kinase 5 (MEKS or MAP2K5) and subsequently the extracellular signal regulated kinase 5 (ERKS or MAPK7). Apelin transcription is down regulated by BMP4, 7 and 9 orchestrated via the sma- and mad-related (SMAD) pathway. In contrast, BMP2 is able to induce apelin expression via the nuclear complex beta-catenin and peroxisome proliferator-activated receptor gamma (PPARγ). Thus, the BMPR2 pathway can directly activate KLF2 and regulate apelin (APLN), an upstream regulator of KLF2. The KLF2 transcription factor inhibits endothelin-1 (ET-1 or EDN1) and vascular endothelial growth factor receptor 2 (VEGFR2 or KDR) expression while increasing endothelial nitric oxide synthase (eNOS or NOS3) transcription. These effects lead to a reduction in endothelial cell proliferation, the generation of NO and subsequent vasodilation of pulmonary artery smooth muscle cells (PASMCs). With a dysfunction of the KLF2 gene caused by a germline mutation as detected in this study, several PAH pathways will be activated. (Eichstaedt et al., 2017).

### EXAMPLES

### Example 1

### 1. Materials and Methods

### 1.1 Subjects and Clinical Characterisation

[0163] In all PAH patients of the pilot study diagnosis was performed according to current ERS/ESC-guidelines. All patients underwent a detailed clinical examination including right heart catheterisation as described previously (Grünig et al., 2009). Testing for vasoreactivity and left heart catheterisation were performed when clinically indicated. Clinical assessment of family members included taking medical history, lung function, six minute walking distance, physical examination, 12-lead electrocardiogram, echocardiography at rest and during supine bicycle exercise (Grünig et al., 2009; Kabitz et al., 2008). Acute or chronic pulmonary and cardiac diseases were ruled out in all family members. Blood samples were collected from all patients and relatives of other PAH patients. The protocol of this study confirms to the ethical guidelines of the Declaration of Helsinki. It was approved by the Ethic Committee of Heidelberg University and participants or their parents gave written informed consent.

### 1.2 Development of the PAH/CTEPH/PVOD/HHT-Specific Gene Panel

[0164] We developed a technique which in general would allow to asses up to 50 genes in up to 96 patients/family members simultaneously. In brief, after DNA is extracted, genomic regions of interest were enriched with a self-designed customised PAH panel, sequenced with NGS and possible pathogenic variants confirmed with targeted Sanger sequencing (FIG. 1).

### 1.3 Implementation of the PAII/CTEPH/PVOD/HHT-Specific Gene Panel

[0165] The new gene panel was manually designed with the in silico tool SureDesign (Agilent Technologies, Santa Clara, USA). While the gene panel may assess up to up to 50 genes in 96 patients we concentrated on 43 genes and 37 patients and 5 relatives of other PAH patients to evaluate the sensitivity and specificity of this approach in the presented pilot study.

[0166] For this pilot study, a list of 29 genes including 12 PAH causal genes, was created after extensive literature research (Table 1 lists these 29 genes). The respective genomic regions, i.e. all exons plus 25 base pairs at 5′ and 3′ untranslated region and adjacent exon-intron boundaries, were extracted in silico from the human genome (GhR37/hg19). Subsequently, probes were designed which covered each single DNA base within the desired genomic regions by on average of 7 different probes. Based on the in silico design a customised gene panel was manufactured by Agilent Technologies (HaloPlex).

[0167] DNA from subjects was extracted from peripheral blood using standardised procedures (Qiagen, Hilden, Germany) and tagged with a bar code allowing multiple samples to be included in a single run. The library preparation in vitro included DNA digestion by 16 restriction enzymes and the capture of the desired target genes by biotinylated probes. After pull down of desired fragments with biotin-streptavidin beads fragments were amplified by PCR and loaded onto the MiSeq (Illumina, San Diego, USA) for subsequent sequencing. The kit may either be used entirely in one run on a NGS machine or split up in several runs. The latter option was used for the MiSeq and we performed four runs with 9-12 patients each.

### 1.4 Data Analysis and Setting Adjustments

[0168] Data was imported into SeqPilot 4.1.2 (JSI medical systems GmbH, Kippenheim, Germany). Transcripts were loaded using the GhR37/hg19 automated feature. Regions of interest were defined as coding exons including 20 base pairs of the 5′ and 3′ untranslated region. Default parameters were altered to highlighted changes in the sequence when >20 reads covered the specific base pair to account for non-random distributed reads over target regions in the HaloPlex design (Schroeder et al., 2015).

[0169] While heterozygosity in Sanger sequencing is characterised by an equal frequency of the two variants, NGS is based on probes which amplify regions of interest. Differential amplification of specific probes might lead to a skewed ratio of the two variants. The initial heterozygosity cut-off of 35% to 65% for the two respective alleles was lowered to ≥10% and potential pathogenic variants were re-assessed with Sanger sequencing.

### 1.5 Variant Classification

[0170] Each variant was classified as either clearly benign (polymorphism), likely benign, uncertain significance, likely pathogenic or clearly pathogenic as recommended by the Human Genome Variation Society (HGVS, http://www.hgvs.org/) (Richards et al., 2015). Each variant was evaluated in terms of minor allele frequency (MAF) in ENSEMBL and absolute frequency in the Exome Aggregation Consortium (ExAC) including more than 60,000 exomes from unrelated individuals (Lek et al., 2016). The consideration of this large database can prevent common variants from being classified as disease causing (Granzow et al., 2015). Polymorphisms were defined as a MAF≥5% (Richards et al., 2015). All variants with a MAF<5% were sought in the Human Gene Mutation Database (HGMD Professional 2015.4). Additionally, for variants of BMPR2, ENG, ALK1 and SMAD4 present in the ARUP data base (http://www.arup.utah.edu/database/) a literature search was conducted. Non-synonymous missense variants with MAF<5% were characterised using four in silico prediction programmes: MutationTaster, SIFT, Align GVGD and PolyPhen2 implemented in Alamut 2.7.1 (interactive biosoftware, Rouen, France). Variants were considered as likely pathogenic in case of non-sense, frameshift and splice site mutations not occurring in the last exon of a gene (Wallis et al., 2013) and are tetmed mutations hereafter. Variants which could not be clearly assigned with the majority of the in silico prediction tools were classified as having an “uncertain significance”.

### 1.6 Sanger Sequencing, Multiplex Ligand-Dependent Probe Amplification and Statistical Evaluation

[0171] All variants of uncertain significance, likely pathogenic variants or mutations were reanalysed with Sanger sequencing after designing specific primers and evaluating the optimal polymerase chain reaction (PCR) conditions.

| | | | SEQ ID |
|---|---|---|---|
| Gene | Primer name | Primer sequence 5′-3′ | NO. |
| ACVRL1 | ACVRL1-X3 M13Fn1 | TTCAAGGTGTTTGTCTGAGGG | 44 |
| ACVRL1 | ACVRL1-X3 P172Rn1 | CCAGAGCATGAGAGGAAAGG | 45 |
| ACVRL1 | ACVRL1-X5 M13f | GGATAGAGAAGGGGGCTGTG | 46 |
| ACVRL1 | ACVRL1-X5 P172rn | TAGCCAAAAACTCCCTCACC | 47 |
| ACVRL1 | ACVRL1-X6 M13fn | CCCAGTGTGTAACCCTCACC | 48 |
| ACVRL1 | ACVRL1-X6 P172rn | GGAGGTCTGCAAACTTGAGC | 49 |
| ACVRL1 | ACVRL1-X7 M13fn | GCTGAGTCACCCAACCTTTC | 50 |
| ACVRL1 | ACVRL1-X7 P172rn | AGACAACTCGTGGGGTCTTG | 51 |
| ACVRL1 | ACVRL1-X8 M13fn | GATCCCAGGTTTGGGAGAG | 52 |
| ACVRL1 | ACVRL1-X8 P172en | AACAGGCTGATTCCCCTTTC | 53 |
| ACVRL1 | ACVRL1-X10 M13fn2 | TGTCTTTCCTCTCGCTCTCC | 54 |
| ACVRL1 | ACVRL1-X10 P172rn2 | ACCAGCACACACCACACTCAC | 55 |
| BMPR2 | BMPR2-X1 f-M13 | GTGATACGGGCAGGATCAGT | 56 |
| BMPR2 | BMPR2-X1 r-P172 | ATTTCCCTGGAAGGCATGG | 57 |
| BMPR2 | BMPR2-X3 f-M13 | TAGCTTACACGTACTCTCAC | 58 |
| BMPR2 | BMPR2-X3 r1-P172 | CATCACGCCTGGCTTCAAC | 59 |
| BMPR2 | BMPR2-X6 f-M13 | CAGAGAGCTGTAGCATTCTG | 60 |
| BMPR2 | BMPR2-X6 r-P172 | GCTGGAGTACGGCTGTACAAT | 61 |
| BMPR2 | BMPR2-X7 Seqf | CGCATTTTTTCCTCTATATAG | 62 |
| BMPR2 | BMPR2-X7 r-P172 | TTCCTGTTGTGAATTTTGAACC | 63 |
| BMPR2 | BMPR2-X9F1-M13 | TTCAGGAAGGGCATTTTATAGG | 64 |
| BMPR2 | BMPR2-X9R1-M13 | CATCCTGCTGCTAATAATGTTTC | 65 |
| BMPR2 | BMPR2-X10 f-M13 | TTGGTATCAGAAATACCCCTGTT | 66 |
| BMPR2 | BMPR2-X10 r-P172 | CAAACAACATTAAAACATATTCAGTCA | 67 |
| BMPR2 | BMPR2-X11 Seqf | CACATGGTTTGACATGTACTTTG | 68 |
| BMPR2 | BMPR2-X11 r-P172 | TCATTGAACTATTAGGCTGGTT | 69 |
| BMPR2 | BMPR2-X12-3 f2 M13 | AGCAGAACCTTCCCAAGAGAC | 70 |
| BMPR2 | BMPR2-X12-3 r2 P172 | TCTGAACATGGATTGCTGTTG | 71 |
| BMPR2 | BMPR2-X12-4 f2 M13 | TGAGCATGAGCCTTTACTGAG | 72 |
| BMPR2 | BMPR2-X12-4 r3 P172 | TAGTTATTTAAATGGCCCCA | 73 |
| BMPR2 | BMPR2-X13 f-M13 | CACCCTCCTGAGACATTGGT | 74 |
| BMPR2 | BMPR2-X13 r-P172 | CATCTTCTGCATGTTTAAATGA | 75 |
| EIF2AK4 | EIF2AK4 X6 M13 | GTAATTAGCACATCCGTCACTGC | 76 |
| EIF2AK4 | EIF2AK4 X6-35 P172 | GGAGTTTGCCCGATGTTTACC | 77 |
| EIF2AK4 | EIF2AK4 X8-2 M13 | ACTTTCTGTTTAATGTGCAGGC | 78 |
| EIF2AK4 | EIF2AK4 X8-4 P172 | CACCTTGGATGCTTACCTGC | 79 |
| EIF2AK4 | EIF2AK4 X12 M13 | TGACTGTAGCTGTGGGACTC | 80 |
| EIF2AK4 | EIF2AK4 X12-354 | GTGTCACTTCGCCCTTGATC | 81 |
| | P172 | | |
| EIF2AK4 | EIF2AK4 X23 M13 | GACTTCAATGGTCCCAGTAGC | 82 |
| EIF2AK4 | EIF2AK4 X23 P172 | TTCCTCCACCCCAGTAACAC | 83 |
| EIF2AK4 | EIF2AK4 X38 M13 | AACCCCAGCAGTCTCCTAAC | 84 |
| EIF2AK4 | EIF2AK4 X38 P172 | GGGACAGCTACTCCTAGGAC | 85 |
| ENG | ENG-X2 f | CCTCATAAGGTGGCTGTGATGATG | 86 |
| ENG | ENG-X2 r | CATCTGCCTTGGAGCTTCCTCT | 87 |
| ENG | ENG-X9 M13fn | TGGGTTGTGGTCAGTCCTTG | 88 |
| ENG | ENG-X9 P172rn | TGCTCTCCCAAACACACCTC | 89 |
| ENG | ENG-X13 M13fn | CTCCCAAAGGTGCCACATAC | 90 |
| ENG | ENG-X13 P172rn | CTAGGCTGCTATGGCTCTGG | 91 |
| HRG | HRG X1-66 M13 | CAGTGGCAGATCATAGCAAGG | 92 |
| HRG | HRG X1 P172 | AGCCATTCATTGTGCAAAGC | 93 |
| SMAD1 | SMAD1-X3F | GCAGCAGGACAGGGATCAG | 94 |
| SMAD1 | SMAD1-X3R | GTTGACCCAGCTTTTCCG | 95 |
| SMAD4 | SMAD4 X3-43 M13 | CTCATGTGATCTATGCCCGTC | 96 |
| SMAD4 | SMAD4 X3 P172 | ACTACAATACTCGGTTTTAGCAGTC | 97 |
| SMAD6 | SMAD6 X4 M13 | GTTGTGCGCCATATTTCCTGAG | 98 |
| SMAD6 | SMAD6 X4-347 P172 | CGATCTTGCTGCGCGTTC | 99 |
| SMAD7 | SMAD7 X1-232 M13 | CTTCTTCATGGTGTGCGGAG | 100 |
| SMAD7 | SMAD7 X1-314 P172 | GCCGCTCCTTCAGTTTCTTG | 101 |
| VCAN | VCAN X3-117 M13 | GTTACAACACCAGTGAATTTCTCC | 102 |
| VCAN | VCAN X3 P172 | TTTTCCGCTCATCCAAACCC | 103 |
| VCAN | VCAN X7-735 M13 | CAGAAGACACCATCCACACTC | 104 |
| VCAN | VCAN X7-1938 P172 | TCTGTTCTCATCTCTGGTATTAGTG | 105 |
| VCAN | VCAN X7-2748 M13 | TGTTCCTCCCACTACCCTTG | 106 |
| VCAN | VCAN X7 P172 | ACTCCAGTTATCTTCTAATAGCAGC | 107 |

[0172] Sensitivity and the specificity were estimated using BMPR2, ALK1 and ENG genes fully sequenced with Sanger and NGS technique. Sensitivity is defined in our case as the percentage of mutations identified by Sanger (gold standard) which were also detected by NGS. By the set-up of NGS being followed by Sanger validation this two-step procedure has a specificity of 100%, since all NGS false positives are removed in the Sanger validation step.

[0173] Patients who showed no mutations within BMPR2, ALK1 or ENG were additionally assessed with multiplex ligand-dependent probe amplification (MLPA, it P093-C1, MRC-Holland, Amsterdam, Netherlands) to detect large deletions or duplications encompassing exonic regions of BMPR2, ALK1 and ENG.

### 1.7 Splice Site Mutation Assessment

[0174] Suspected splice site mutations were investigated on RNA level. RNA was extracted following standard procedures. Complementary DNA was generated with a reverse transcriptase assay. Exons of interest were amplified in samples and controls with PCR and splice site alterations were visualised by agarose gel electrophoresis and Sanger sequencing; conditions are available upon request.

### 2. Results

### 2.1 Patient Population

[0175] We included 37 patients and 5 first degree family members of affected individuals in the panel. Of the patients 19 suffered from IPAH, 8 had HPAH, one patient had PAH associated with congenital heart defects (CHD-APAH) and one patient APAH with pulmonary veno-occlusive disease. Eight patients had PAH and hereditary haemorrhagic telangiectasia (HHT) (Table 2). In the 5 family members no pulmonary hypertension or any other cardio-pulmonary disorder has been detected.

### 2.2 Clinical Findings

[0176] Table 3 summarises the main clinical findings in the 37 PAH patients. Patients had severe PAH with impaired right ventricular function, lung function, lowered oxygen saturation and elevated NT-proBNP levels.

### 2.3 Results of PAH/CTEPH/PVOD/HHT-Specific Gene Panel Confirmed by Direct Sanger Sequencing

[0177] FIG. 1 shows how the 42 subjects have been genetically assessed followed by bioinformatic processing. In 22 individuals of the 37 patients (59%) mutations in the BMPR2, ALK1, EIF2AK4 or ENG genes (Table 4) and 12 heterozygous variants of uncertain significance (UVs, Table 5) in 6 further candidate genes were identified by NGS and validated by conventional Sanger sequencing. One patient carried a large heterozygous deletion of exon 6 to exon 7 in BMPR2, identified by MLPA (Table 4).

[0178] Two new heterozygous mutations in EIF2AK4 gene were identified in a H/IPAH patient, respectively. The first EIF2AK4 mutation led to an introduction of a stop codon (exon 8, c.933T>A p.(Y311*)). The second EIF2AK4 mutation (exon 38, c.4892+1G>T) led to a loss of a splice site and subsequent RNA analysis confirmed the loss of exon 38. Twelve UVs were identified in the following PAH genes: EIF2AK4, HRG, SMAD1, SMAD4, SMAD6, SMAD7 and VCAN (Table 5). Of the 12 UVs, four have not yet been identified in healthy individuals. However, these variants were only classified as “pathogenic” by 1-2 of the four in silico prediction programmes.

### 2.4 Sensitivity and Specificity of the PAH-Specific Gene Panel

[0179] The first of four runs of the panel diagnostic experienced technical errors during the sequencing by synthesis on the MiSeq; only 0.8 gigabases (Gb) were sequenced albeit with an average base call error rate≤0.1% (≥Q30) of 91.2%. This drastically reduced the overall coverage leading to a lack of detection of 2 mutations previously identified with Sanger sequencing. These errors were clearly visible in quality parameters during sequencing and were addressed in the subsequent runs (run 2: 5.5 Gb, ≥Q30=90.5%; run 3: 5.8 Gb, ≥Q30=92.1%; run 4: 5.4 Gb, ≥Q30=90.6%). Hence, 100% sensitivity could be obtained in the following runs with an average coverage of approximately 800×. Nevertheless, 14 false positive mutations/variants were initially found with NGS panel which could not be confirmed by Sanger sequencing. These variants were either characterised by “short reads” of 25-36 bp (n=4), a very low heterozygosity of 10-15% (n=5) or other sequencing artefacts (n=5). Several of these artefacts were not confined to single patients and thus clearly identifiable as technical artefacts. Since in routine diagnostics all NGS mutations are verified with Sanger as a second step all false positives would be discovered. Therefore, a specificity of 100 is reached.

### 2.5 Comparison of Sequencing and Analysis Methods

[0180] With the ultimate goal detecting new variants/mutations in PAH/CTEPH/PVOD/HHT related genes efficiently, the approach of NGS for a specific PAH/CTEPH/PVOD/HHT gene panel enabled highly sensitive, cost- and time-saving sequencing. Technical specifications of the commonly used Sanger sequencing and the new PAH/CTEPH/PVOD/HHT-specific gene panel diagnostic with NGS were compared in Table.

[0181] The panel diagnostic in the pilot study allowed sequencing all exons in 29 genes at the same time instead of only one direction of one exon per reaction by Sanger. Not only each exon has to be sequenced separately with Sanger sequencing but also each patient. Meanwhile, the panel diagnostic allows assessing up to 96 patients at the same time albeit keeping the data storage requirements at a moderate level.

[0182] The Sanger technique requires approximately 11 h assessment time/per patient for the 3 major PAH/CTEPH/HHT genes BMPR2, ALK1 and ENG. In contrast, the new panel technique in our diagnostic setting allowed the assessment of 29 genes within 5 h assessment time/per patient plus the time required for confirmatory Sanger sequencing. This huge time advantage was enabled by processing several patient samples and PAH/CTEPH/PVOD/HHT genes simultaneously in the laboratory (48 h sample processing in the laboratory for 12 samples at once, see Table 6). While data generation is faster than Sanger sequencing, data analysis and bioinformatics processing is prolonged as any possible pathogenicity of rare variants has to be investigated by in silico prediction programmes and literature research. Nevertheless, once a data base has been established classifying the effect of variants data analysis can be accelerated.

[0183] When large deletions and insertions are identified with the PAH/CTEPH/PVOD/HHT-specific gene panel based on NGS, it is preferred to confirm such findings with a second method such as MLPA or quantitative PCR. The PAH/CTEPH/PVOD/HHT-specific gene panel is not limited to the sequence data analysis regarding mutations but also enables the detection of large deletions or insertions in the routine diagnostic setting.

TABLE 1
PAH/CTEPH causal genes and candidate genes (of the pilot study)

| | ENSEMBL | Gene size | Exon | Transcribed |
|---|---|---|---|---|
| Gene name | Gene ID | (bp) | number | exons |
| ACVR1 | ENSG00000115170 | 139418 | 12 | 4-12 |
| ACVRL1 | ENSG00000139567 | 16453 | 10 | 2-10 |
| (ALK1) | | | | |
| BMP2 | ENSG00000125845 | 12616 | 3 | 2-3 |
| BMPR1A | ENSG00000107779 | 176188 | 13 | 3-13 |
| BMPR1B | ENSG00000138696 | 400480 | 13 | 4-13 |
| BMPR2 | ENSG00000204217 | 190815 | 13 | 1-13 |
| CAV1 | ENSG00000105974 | 36399 | 3 | 1-3 |
| CREB | ENSG00000118260 | 73694 | 9 | 3-9 |
| EIF2AK4 | ENSG00000128829 | 101445 | 39 | 1-39 |
| ENG | ENSG00000106991 | 39744 | 15 | 1-15 |
| HRG | ENSG00000113905 | 18024 | 7 | 1-7 |
| ID1 | ENSG00000125968 | 1232 | 2 | 1-2 |
| ID2 | ENSG00000115738 | 5608 | 5 | 2-3 |
| ID3 | ENSG00000117318 | 1876 | 3 | 1-2 |
| ID4 | ENSG00000172201 | 3298 | 3 | 1-2 |
| IL6 | ENSG00000136244 | 6118 | 6 | 2-6 |
| KCNA5 | ENSG00000130037 | 1842 | 6 | 1 |
| KCNK3 | ENSG00000171303 | 40730 | 2 | 1-2 |
| SMAD1 | ENSG00000170365 | 76885 | 7 | 2-7 |
| SMAD4 | ENSG00000141646 | 56651 | 12 | 2-12 |
| SMAD5 | ENSG00000113658 | 55902 | 8 | 3-8 |
| SM4D6 | ENSG00000137834 | 80620 | 4 | 1-4 |
| SMAD7 | ENSG00000101665 | 30858 | 4 | 1-4 |
| SMAD9 | ENSG00000120693 | 75934 | 7 | 2-7 |
| SOD2 | ENSG00000112096 | 93472 | 6 | 1-5 |
| TOPBP1 | ENSG00000163781 | 63718 | 28 | 2-28 |
| VCAN | ENSG00000038427 | 110838 | 15 | 2-15 |
| VHL | ENSG00000134086 | 11212 | 3 | 1-3 |
| ZFYVE16 | ENSG00000039319 | 71337 | 19 | 3-19 |

[0184] Bold genes indicate 12 of the 14 known PAH genes.

TABLE 2
Characteristics of study population

| Characteristics of study | |
|---|---|
| population | |
| Gender, n (%) female | 35 (83%) |
| Age (years) | 48 ± 13 |
| Disease | |
| IPAH | 19 (45%) |
| HPAH | 8 (19%) |
| CHD-APAH | 1 (2%) |
| PVOD-APAH | 1 (2%) |
| PAH and HHT | 8 (19%) |
| Family member of PAH patient | 5 (12%) |

Values are given as n (%) or mean ± standard deviation
IPAH idiopathic pulmonary arterial hypertension,
HPAH hereditary pulmonary arterial hypertension,
CHD-APAH congenital heart defect with associated PAH,
PVOD pulmonary veno-occlusive disease,
HHT hereditary haemorrhagic telangiectasia

TABLE 3
Clinical characteristics of the 37 PAH patients

| | Mean ± Standard |
|---|---|
| Characteristic* | deviation |
| Age at first diagnosis of PAH [years], | 50 ± 13 |
| n = 37 | |
| Age at first diagnosis of HHT [years], | 9 ± 3 |
| n = 8 | |
| 6-minute walking test | |
| 6MWD [m] | 415 ± 53 |
| Borg Scale out of 20 | 13 ± 2 |
| SaO₂ after 6MWD [%] | 92 ± 2 |
| Lung function | |
| Vital capacity max [%] | 79 ± 17 |
| Forced vital capacity [%] | 88 ± 9 |
| FEV1 [%] | 72 ± 17 |
| Peak expiratory flow [%] | 83 ± 11 |
| SaO₂ at rest [%] | 96 ± 1 |
| Echocardiography at rest and during | |
| exercise | |
| Right atrial area [cm²] | 23 ± 8 |
| Right ventricular area [cm²] | 22 ± 4 |
| Vena cava inferior [cm] | 1.9 ± 0.1 |
| sPAP at rest [mmHg] | 64 ± 19 |
| TAPSE [cm] | 2.2 ± 0.5 |
| TDI-s [cm/s] | 12 ± 3 |
| Left ventricular eccentricity index | 1.3 ± 0.3 |
| Workload during exercise [Watt] | 79 ± 23 |
| sPAP during exercise [mmHg] | 97 ± 23 |
| Right heart catheter | |
| mPAP [mmHg] | 53 ± 11 |
| PAWP [mmHg] | 10 ± 4 |
| Cardiac output [l/min] | 4.3 ± 1.4 |
| Cardiac index [l/min/m²] | 2.5 ± 0.8 |
| PVR [dynes] | 1045 ± 517 |
| Laboratory | |
| NT-proBNP [pg/ml] | 1800 ± 2289 |

*not all measurements were obtained from each patient
data are given as mean ± standard deviation
SaO₂ arterial oxygen saturation,
6MWD 6-minute walking distance
FEV1 Forced expiratory volume 1st second,
sPAP systolic pulmonary arterial pressure,
TAPSE Tricuspid annular plane systolic excursion
mPAP Mean pulmonary artery pressure,
PAWP Pulmonary arterial wedge pressure,
PVR Pulmonary vascular resistance

TABLE 4
Variants/mutations detected with Sanger and NGS-gene panel

| Gene | Exon | Variant name | Impact | Sanger | Panel |
|---|---|---|---|---|---|
| ACVRL1 | 3 | c.128_132delGGCCT | deletion | yes | yes |
| | | p.(G43D)fs*124 | | | |
| ACVRL1 | 5 | c.595G>C p.(A199P) | missense | yes | yes |
| ACVRL1 | 6 | c.662G>A p.(W221*) | nonsense | yes | yes |
| ACVRL1 | 7 | c.788A>G p.(D263G) | missense | yes | yes |
| ACVRL1 | 7 | c.950T>C p.(1317T) | missense | yes | yes |
| ACVRL1 | 8 | c.1055C>A p.(A352D) | missense | yes | yes |
| ACVRL1 | 8 | c.1231C>T p.(R411W) | missense | yes | yes |
| ACVRL1 | 10 | c.1451G>A p.(R484Q) | missense | yes | yes |
| BMPR2 | 1 | c.76+1G>T | intronic | yes | yes |
| BMPR2 | 3 | c.377A>G, p.(N126S) | missense | yes | * |
| BMPR2 | 3 | c.418+5G>A | intronic | yes | yes |
| BMPR2 | 6 | c.631C>T p.(R211*) | nonsense | yes | yes |
| BMPR2 | 6 | c.659dupG | duplication | yes | yes |
| | | p.(G220fs*4) | | | |
| BMPR2 | 7 | c.967+5G>A | intronic | yes | yes |
| BMPR2 | 6-7 | deletion exon 6-7** | large | no | no |
| | | | deletion | | |
| BMPR2 | 9 | c.1129-1_1129dupGG | duplication | yes | yes |
| | | p.(V377Gfs*13) | | | |
| BMPR2 | 10 | c.1277-9A>G | splice | yes | * |
| | | | defect | | |
| BMPR2 | 10 | c.1297C>T p.(Q433*) | nonsense | yes | yes |
| BMPR2 | 11 | c.1453G>A p.(D485N) | missense | yes | yes |
| BMPR2 | 12 | c.2308delC | deletion | yes | yes |
| | | p.(R770Gfs*2) | | | |
| BMPR2 | 12 | c.2695C>T p.(R899*) | nonsense | yes | yes |
| BMPR2 | 13 | c.3062_3064delAAG | deletion | yes | yes |
| | | p.(E1021 . . . 1022G) | | | |
| EIF2AK4 | 8 | c.933T>A p.(Y311*) | nonsense | yes | yes |
| EIF2AK4 | 38 | c.4892+1G>T | splice | yes | yes |
| | | | defect | | |
| ENG | 2 | c.90T>G p.(C30W) | missense | yes | yes |
| ENG | 9 | c.1268A>G p.(N423S) | missense | yes | yes |
| ENG | 13 | c.1741_1742dupTCTG | duplication | yes | yes |
| | | p.(G581fs) | | | |

*Technical errors during the run were evident during the data generation.
These samples would be repeated during diagnostics due to low quality values.
**This large deletion was detected with MLPA and was not visible with Sanger nor NGS

TABLE 5
New variants of unknown significance detected by NGS and confirmed with Sanger sequencing

| | | | | | | | Align | % in |
|---|---|---|---|---|---|---|---|---|
| Gene | Exon | Variant name | Impact | MutationTaster | SIFT | PolyPhen2 | GVGD | ExAC |
| EIF2AK4 | 6 | c.627A > C p.(Q209H) | missense | benign | benign | pathogenic | benign | 0.0041% |
| EIF2AK4 | 12 | c.1819-16C > G | intronic | benign | NA | NA | NA | — |
| EIF2AK4 | 23 | c.3329T > G p.(M1110R) | missense | pathogenic | benign | pathogenic | benign | — |
| HRG | 1 | c.167C > T p.(A56V) | missense | pathogenic | pathogenic | pathogenic | pathogenic | 0.0568% |
| SMAD1 | 3 | c.549G > A p.(P183P) | synonymous | pathogenic | NA | NA | NA | 0.0016% |
| SMAD4 | 3 | c.354G > A p.(A118A) | synonymous | benign | NA | NA | NA | 0.0016% |
| SMAD6 | 4 | c.173C > T p.(A58V) | missense | benign | pathogenic | benign | benign | — |
| SMAD7 | 1 | c.115G > A p.(G39R) | missense | pathogenic | pathogenic | pathogenic | benign | 0.028% |
| SMAD7 | 3 | c.709G > A p.(G237R) | missense | pathogenic | pathogenic | benign | uncertain | — |
| VCAN | 3 | c.301G > T p.(V101L) | missense | pathogenic | pathogenic | pathogenic | benign | 0.0016% |
| VCAN | 7 | c.1045A > G p.(K349E) | missense | benign | pathogenic | pathogenic | pathogenic | 3.106% |
| VCAN | 7 | c.4003 + 16C > G | intronic | pathogenic | NA | NA | NA | 0.1087% |

ExAC: Exome Aggregation Consortium

TABLE 6
Comparison of common Sanger sequencing with the
PAH-specific gene panel in our diagnostic setting

| | Sanger | PAH-specific |
|---|---|---|
| | Sequencing | gene panel by |
| Characteristic | (3 genes) | NGS (29 genes) |
| Genes | BMPR2, | BMPR2, ALK1, |
| | ALK1, | ENG, EIF2AK4, |
| | ENG | KCNK3, CAV1, . . . |
| Time expense | | |
| Preparation time/gene | 8 hours | 24 hours |
| Sequencing time/gene | 2 hours | 24 hours |
| Analysis time of | 1 hour | 3 hours |
| data/patient | | |
| Total time effort | 11 hours | 51 hours |
| Maximum patients | 1 patient | 12 patients |
| per run | | |
| Exons per patient | 1 exon | All exons |
| per reaction | | of 29 genes |
| Total time per patient | 11 hours | 5 hours* |
| Data storage | | |
| Implementation and | Easy | Moderate |
| handling | | |

*these data refer to average values per patient considering a joined preparation of 12 samples

### EXAMPLE 2 EIF2AK4 Mutation as “Second Hit” in Hereditary Pulmonary Arterial Hypertension

### 1. Materials and Methods

### 1.1 Subjects and Clinical Characterisation

[0185] Members of a family with autosomal dominantly inherited HPAH were clinically and genetically assessed. All living genetically related family members were invited to participate in a clinical and genetic evaluation. After written informed consent was obtained family members underwent clinical assessment and genetic counseling. A three generation pedigree was drawn including nine family members of the index patient. EDTA-blood was taken for genetic analysis.

[0186] Clinical procedures consisted of recording the family and medical history, physical examination, laboratory parameters including N-type pro brain natriuretic peptide (NT-proBNP), 12-lead electrocardiogram, lung function test, arterial blood gases, 6-minute walking distance, echocardiography, stress-Dopplerechocardiography and cardiopulmonary exercise testing as described previously (Hinderhofer et al., 2014). High resolution computer tomography of the lung was conducted to exclude pulmonary veno-occlusive disease. Left heart catheterisation was performed in all patients with suspected left heart diseases and when clinically indicated. Manifest HPAH was diagnosed according to the current guidelines (Galiè et al., 2016). Right heart catheterisation was performed in the living HPAH patients to confirm diagnosis and for follow-up.

### 1.2 Genetic Assessment

[0187] Genomic DNA was isolated from peripheral blood using a salting out procedure (Miller et al., 1988) (Autopure, LGC, Germany). Sanger sequencing for BMPR2 (ENST00000374580) was conducted in the index patient using Big Dye Terminator V1.1 cycle sequencing kit and ABI 3130x1 genetic analyzer (ThermoFisher Scientific, USA). Duplications and deletions were screened by multiplex ligation-dependent probe amplification (MLPA, kit P093-C2, MRC-Holland, the Netherlands).

[0188] A new PAH gene panel diagnostic based on next-generation sequencing was designed to analyse second hit mutations in 11 PAH (ACVRL1 or ALK1, BMPR1B, BMPR2, CAV1, EIF2AK4, ENG, KCNA5, KCNK3, SMAD1, SMAD4, SMAD9) and 20 further candidate genes in the index patient. DNA was enriched with a customised SureDesign panel (Agilent Technologies, USA) and sequenced on the MiSeq (Illumina, USA). Exonic regions and exon-intron boundaries were analysed with SeqPilot 4.1.2 (JSI medical systems GmbH, Germany). Variants were characterised following the recommendations of the Human Genome Variation Society (HGVS version 2.15.11) (den Dunnen et al., 2016). Non-synonymous missense variants with a population frequency <5% were assessed regarding their evolutionary conservation, location within functional gene domains and functional consequence using four in silico prediction programs: MutationTaster, SIFT, Align GVGD and PolyPhen2 implemented in Alamut Visual 2.7.1 (interactive biosoftware, France). Variants were confirmed by Sanger sequencing in the index patient and assessed in family members to clarify mutation status. Any variants disrupting gene function were considered mutations.

### 1.3 Functional Assessment of Mutations

[0189] RNA was isolated from EDTA blood using standard procedures. Copy DNA (cDNA) was generated with a reverse transcriptase reaction adding hexamers for 10 min at 65° C., a cDNA-Mix (Invitrogen, USA) for 2 hours at 37° C. and a final reaction for 10 min at 65° C.

[0190] A PCR was designed to assess the cDNA corresponding to the messenger RNA of EIF2AK4 (ENSG00000128829; SEQ ID NO. 5) The PCR product span the exon 38 using a forward primer annealing in exon 36 (5′ GACCTCCCTTGCCAACTTAC 3′; SEQ ID NO. 108) and a reverse primer annealing in exon 39 (5′ AGAT TCTGTAGTAGTCATCTCTATAGC 3′; SEQ ID NO. 109). The expected size of the intact PCR product was 266 bp and the one of the PCR product skipping exon 38 was 147 bp. cDNA was denatured for 5 min at 95° C., and subsequently amplified in 35 cycles (1 min at 95° C., 1 min at 56.5° C., 1 5 min at 72° C.; final elongation 10 min at 72° C.). While several transcripts exist for EIF2AK4 the considered isoform is the most common one in humans since it is referred to as reference sequence by NCBI RefSeq. NCBI RefSeq is a database which we used as reference standard for reporting the location of medically important variations. PCR products were sequenced with Sanger sequencing to identify the altered base pair sequence of the messenger RNA.

### 1.4 Statistical Analyses

[0191] Significance of co-occurance of BMPR2 and EIF2AK4 was calculated by using an estimated heterozygote frequency of EIFAK4 mutations retrieved from the Exome Aggregation Consortium (ExAC) database (Lek et al., 2016) and taking into account the number of genes on the panel by correcting for multiplicity. A p-value lower than 5% was considered statistically significant.

### 2. Results

### 2.1 Clinical Characterisation

[0192] Clinical parameters are presented in Table 7. PAH was excluded in healthy family members by regular clinical assessments including physical examination, lung function tests, ECG, and in particular by echocardiography, stress-Doppler-echocardiography, spiroergometry and NT-proBNP values. Diagnosis of PAH was confirmed by right heart catheterisation in patients II:4, III:2 and III:3. The disease was very severe in all three patients but could be stabilised with medication in patients II:4, and Patient III:3 showed a rapid progression and received a lung transplantation 1.5 years after diagnosis. She died only one year after transplantation due to a rejection of the donor organ. Patient II:4 and III:2 were under dual therapy at the time of this writing. Stable haemodynamic parameters were observed in the latest catheter of patient II:4 with a mean pulmonary artery pressure (mPAP) of 46 mmHg, pulmonary arterial wedge pressure (PAWP) of 12 mmHg, cardiac output 4.6 l/min, cardiac index 2.3 l/min/m² and pulmonary vascular resistance of 591 dynes. Patient III:2 has improved under therapy to a mPAP of 55 mmHg, PAWP of 14 mmHg, cardiac output 6.0 l/min, cardiac index 2.9 l/min/m² and pulmonary vascular resistance of 547 dynes. Pulmonary veno-occlusive disease (PVOD) was excluded in the patients on three grounds. Firstly, high resolution computer tomography showed no morphological changes typical for PVOD. Secondly, diffusion capacity of the lung for carbon monoxide (DLCO) values were greater than 50% predicted. Values around 50% are often seen in PVOD (Montani et al., 2008). Thirdly, patients II:4 and III:2 have received PAH medication for eight years and were stable under dual therapy. Whereas in PVOD a worsening of symptoms is often observed, once PAH medication has been given.

TABLE 7
Clinical parameters

| Parameter | II:4 | III:2 | III:4 |
|---|---|---|---|
| Age at diagnosis | 49 | 29 | — |
| mPAP [mmHg]¹ | 55 | 63 | — |
| PAWP [mmHg]² | 13 | 14 | — |
| CO [l/min] | 6.1 | 5.1 | — |
| CI [l/min/m²] | 3.2 | 2.4 | — |
| PVR dynes | 551 | 736 | — |
| SaO₂ % | 97 | 98 | 96 |
| sPAP [mmHg] at rest³ | 94 | 47 | 20 |
| sPAP [mmHg] during | 100 | 95 | 29 |
| exercise³ | | | |
| Peak VO₂ [ml/mm/kg] | 18 | 17 | 24 |
| RV area [cm²] | 18 | 27 | 15 |
| TAPSE [cm] | 3.0 | 2.4 | 2.3 |
| DLCO predicted [%] | 77 | 60 | 91 |
| NT-proBNP | 89 | 58 | 31 |
| 6-MWD | 480 | 560 | — |
| Medication | Silenafil, | Sildenafil, | — |
| | Macitentan | Macitentan | |

¹mPAP ≥25 mmHg characterises pulmonary hypertension
²PAWP >15 mmHg together with mPAP ≥25 mmHg characterises post-capillary pulmonary hypertension due to left heart disease; PAWP ≤15 mmHg together with mPAP ≥25 mmHg characterizes pre-capillary PH
³sPAP >40 mmHg at rest and sPAP >45 mmHg at low workloads is considered here as abnotmal and exercise induced pulmonary hypertension, respectively (Nagel et al., 2015).
However, cut-offs are not clearly defined in current guidelines.
mPAP, (sPAP) mean (systolic) pulmonary arterial pressure,
PAWP pulmonary arterial wedge pressure,
CO cardiac output,
CI cardiac index,
SaO₂ oxygen saturation,
VO₂ oxygen uptake,
PVR pulmonary vascular resistance,
RV right ventricular,
TAPSE tricuspid annular plane systolic excursion,
DLCO diffusion capacity of the lung for carbon monoxide,
NT-proBNP N-type pro brain natriuretic peptide,
6-MWD 6 minute walking distance

### 2.2 Genetic Findings

[0193] All living family members with manifest HPAH (II:4, III:2) carried a heterozygous mutations in BMPR2 and EIF2AK4. In contrast, two non-diseased family members (III:1 and III:4) carried only the BMPR2 mutation and no mutation in EIF2AK4. None of these family members developed manifest HPAH at of the time of this writing.

[0194] The first familial mutation lay within exon 12 of the BMPR2 gene (c.2308delC, p.(Arg770Glyfs*2)) and led to the deletion of a cytosine resulting presumably in a premature stop codon two amino acids downstream. The second mutation was located one base pair behind the end of exon 38 of the gene EIF2AK4 (c.4892+1G>T) resulting in the loss of the complete exon 38 (FIG. 2). Due to this exon loss sequencing results suggested a frame shift and subsequent introduction of a premature stop codon in exon 39 at amino acid position 1599 instead of position 1650 in the regular protein; hence, a disrupted protein after the end of exon 37 is predicted.

[0195] While DNA was only available from five family members the pedigree analysis revealed two further obligate carriers of the BMPR2 mutation. The grandfather (I:1) and the aunt (II:2) of the index patient must have been carriers for the cousin (III:1) to harbour the mutation. At the same time, the EIF2AK4 mutation was most likely also present in the grandfather (I:1), who had died aged 49 years due to liver cirrhosis. Since the mother of the index patient (II:4) only developed manifest PAH at the age of 49 years, it is likely that the grandfather would have developed PAH due to the inferred presence of both mutations at a later stage in his life or had already developed the disease but had not been diagnosed until his death. Alternatively, the EIF2AK4 mutation might have arisen de novo in II:4 or as a genii line mosaicism in either grandparent of the index patient.

[0196] In HPAH we expect a BMPR2 mutation with a probability of 85% (Machado et al., 2015; Pfarr et al., 2011). Under the null hypothesis stating that the mutation in EIF2AK4 does not contribute to disease manifestation but instead represents a random event for the proband, the chance to observe the association of the two mutations has the probability of 0.00046. Taking the number of genes on the panel into account this association of both mutations under the null hypothesis reveals p=0.00046*30=0.014, which is significant below the 5% level. Hence, the co-occurrence of both mutations in affected family members is a significant association. Moreover, EIF2AK4 co-segregates with disease conditioned on all BMPR2 positive family members supporting the hypothesis of a second hit model, in which the diplotype of mutations in both genes has a high penetrance for PAH.

### EXAMPLE 3 Identification KLF-2 Mutation in Heritable Pulmonary Arterial Hypertension

### 1. Materials

### 1.1 Subjects and Clinical Characterisation

[0197] Members of a HPAH family were genetically and clinically assessed after providing their written informed consent for genetic and clinical analysis. The study was approved by the Ethics Committee at Heidelberg University and carried out in accordance with the Declaration of Helsinki (2013) of the World Medical Association. Diagnosis of PAH was continued by right heart catheterisation in all affected family members. Family members with no symptoms or signs of PAH were assessed by obtaining medical history, physical examination, 12-lead ECG, lung function test, chest X-ray, echocardiography at rest and during exercise and laboratory assessment as described previously (Ehlken et al., 2016).

### 1.2 Sanger Sequencing and MLPA

[0198] DNA was extracted from peripheral blood using standardised procedures (Autogene Qiagen, Germany). Sanger sequencing using Big Dye Terminator V1.1 cycle sequencing kit and ABI 3130x1 genetic analyser and multiplex ligation-dependent probe amplification (MLPA, kit P093-C2, MRC-Holland, the Netherlands) was conducted for the index patient for the genes BMPR2 (ENSG00000204217) [SEQ ID NO. 3], ACVRL1 (ENSG00000139567) [SEQ ID NO. 1] and ENG (ENSG00000106991) [SEQ ID NO. 6].

### 1.3 Next-Generation Sequencing and Variant Analysis

[0199] Next-generation sequencing (NGS) was carried out to investigate potential mutations in PAH and candidate genes as described previously (Song et al., 2016). All known PAH genes (ACVRL1, BMPR1B, BMPR2, CAV1, EIF2AK4, ENG, KCNA5, KCNK3, SMAD1, SMAD4, SMAD9 and TOPBP1) and further candidate genes from the BMPR2 pathway and genes which were shown to have a PAH relevance in animal models such as KLF2, KLF4 and KLF5 were included in a PAH-specific gene panel. DNA was enriched with a customised SureDesign panel (Agilent Technologies), sequenced on the MiSeq and analysed with SeqPilot 4.1.2 as described previously (Song et al., 2016). Variants in exonic regions and exon-intron boundaries were characterised following the recommendations of the Human Genome Variation Society (HGVS, http://www.hgvs.org;version 2.15.11) (den Dunnen et al., 2016). Non-synonymous missense variants with a population frequency of less than 5% were assessed regarding their evolutionary conservation, location within functional gene domains and their functional consequence using four in silico prediction programmes: MutationTaster, SIFT, Align GVGD and PolyPhen2 implemented in Alamut Visual 2.7.1. Furthermore, in order to determine gene function, a systematic literature search was performed to investigate mutations, their functions within the cell and their involvement in the BMPR2 pathway, which is affected in most HPAH families (Machado et al., 2015). Any variants disrupting the function of a gene were considered mutations.

[0200] The COSMIC data base (Forbes et al., 2015) for somatic mutations and HGMD for germline mutations, were used respectively together with a systematic literature search in PubMed to list previously reported mutations. Cellular and molecular functions of affected genes relevant to phenotypes observed in PAH were also investigated by a broad literature search.

[0201] Potential mutations were confirmed with Sanger sequencing guaranteeing a 100% specificity. Family members of the index patient were assessed with Sanger sequencing to clarify mutation status.

### 1.4 Statistical Analyses

[0202] Thirteen unrelated IPAH/HPAH patients without mutations in the genes BMPR2, ENG and ACVRL1 were screened for the presence of rare mutations using NGS assessing all exons and exon-intron boundaries. The Fisher's exact test was used to compare mutations in our sample to 126,216 controls (Lek et al., 2016) calculated with BIAS v.11.02.

### 2. Results

### 2.1 Clinical Characteristics

[0203] Three family members of the HPAH family were diagnosed with invasively confirmed manifest PAH. The father (II:4) of the index patient (III:3) had died one year after diagnosis of severe and rapidly progressive HPAH and right heart failure aged 32 years. His two daughters (III:2 and III:3) were diagnosed with HPAH in 1993 and suffered from severe and rapidly progressive disease unresponsive to medical therapy (Table 8). They underwent lung and heart/lung transplantation, respectively, shortly after diagnosis both at the age of 25 years. Both of them are still alive and are doing well as of the time of this writing having been clinically followed for more than 20 years after transplantation. Neither of the sisters had any children. The brother (III:1) and further family members remained unaffected up to the present day with a clinical follow-up of >20 years as well.

TABLE 8
Clinical characterization of affected family members

| Parameter | III:2 | III:3 |
|---|---|---|
| Age at diagnosis | 25 | 25 |
| Age at transplantation | 28 | 27 |
| Heart rate [min⁻¹] | 85 | 92 |
| Blood pressure [mmHg] | 115/80 | 110/80 |
| Lung function | | |
| FEV1 % | 94 | 60 |
| Total resistance [kPa*s/l] | 0.29 | 0.19 |
| SaO₂ % | 98 | 97 |
| Blood gases | | |
| PO₂ [mmHg] | 89 | 91 |
| PCO₂ [mmHg] | 23 | 27 |
| Radionuclide ventriculography | | |
| LVEF % | 60 | 60 |
| RVEF % | 34 | 32 |
| Echocardiography | | |
| sPAP [mmHg] | 67 | 110 |
| Right heart catheter | | |
| mPAP [mmHg] | 48 | 72 |
| PAWP [mmHg] | 10 | 10 |
| PVR [dynes*sec*cm⁻⁵] | 880 | 768 |
| CO [l/min] | 3.9 | 5.9 |
| CI [l/min/kg] | 2.6 | 3.7 |

FEV1 forced expiratory volume in the first second,
SaO₂ arterial oxygen saturation,
PO₂ partial pressure of oxygen,
PCO₂ partial pressure of carbon dioxide,
LVEF left ventricular ejection fraction,
RVEF right ventricular ejection fraction,
sPAP systolic pulmonary artery pressure,
mPAP mean pulmonary artery pressure,
PAWP pulmonary artery wedge pressure,
PVR pulmonary vascular resistance,
CO cardiac output,
CI cardiac index

### 2.2 Genetic Analyses

[0204] In the genetic analysis of the two affected sisters, no disease-causing mutation, deletion or duplication was found in the known and previously published PAH genes (Table 9). By including new candidate genes in the NGS approach, we identified a new, germline heterozygous missense mutation in exon 2, c.862C>T p.H288Y in the Krüppel-like factor 2 (KLF2) gene on chromosome 19 (ENSG00000127528) [SEQ ID NO. 10] in both affected sisters (Table 9).

TABLE 9
Genetic analysis

| Genetic analysis | | Genes included | Results |
|---|---|---|---|
| Sanger sequencing/ | Major PAH | BMPR2, ACVRL1, ENG | Negative |
| MLPA | genes | | |
| Next-generation | Further known | BMPR1B, CAV1, EIF2AK4, | Negative |
| sequencing | candidate | KCNA5, KCNK3, SMAD1, | |
| | genes | SMAD4, SMAD9, TOPBP1 | |
| Next-generation | New candidate | ACVR1, BMP2, BMPR1A, | Germline |
| sequencing | genes | CREB, HRG, ID1, ID2, ID3, | heterozygous |
| | | ID4, IL6, KLF2, KLF4, KLF5, | mutation in exon 2, |
| | | SMAD5, SMAD6, SMAD7, | c.862C>T p.H288Y |
| | | SOD2, VCAN, VHL, ZFYVE16 | in KLF2, on |
| | | | chromosome |
| | | | 19p13.11 |

[0205] No DNA was available from the father who died early due to HPAH. Since the mutation was absent in the healthy mother (II:5) we infer its presence in the deceased father (II:4). We screened all first degree related family members of the father for the presence of the mutation in KLF2 with Sanger sequencing. The mutation was absent in all paternal siblings (II:1-II:3). None of them nor the grand-parents (I:1, I:2) of the index-patient developed PAH. This germline mutation was absent in exomes of >120,000 control subjects assessed by the Exome Aggregation Consortium and the genome Aggregation Database (Lek et al., 2016).

[0206] Similarly, KLF2 was entirely absent from the germline mutation data bases HGMD and ClinVar. The Fisher's exact test showed that the absence of the mutation in 126,216 controls compared to our sample ( 1/14, 2-sided p-value=0.0001) demonstrated a significant association of the KFL2 variant with PAH. The effect of the mutation was classified as pathogenic by four in silico prediction programmes (respective scores: MutationTaster: 1, SIFT: 0, PolyPhen2: 0.927, Align GVGD: C65). The mutation led to the substitution of a highly conserved nucleotide and subsequently the exchange of a highly conserved amino acid within a zinc finger protein domain. This domain is characterised by two cysteine and two histidine residues (2Cys-2His) forming two beta sheets and one alpha helix.

[0207] The mutation might have occurred de novo in the father, who could not be analysed, or was inherited by one of the grandparent presenting with reduced penetrance. Under both assumptions KLF2 co-segregates with the disease in this family based on the genetically analysed family members. So far we could not identify further KLF2 mutations in 13 other unrelated IPAH/HPAH patients without mutations in BMPR2, ENG or ACVRL1.

### 2.3 Involvement of the KLF2 Gene in PAH Pathways

[0208] KLF2 is highly important for lung functioning, represented by its previous name “Lung KLF” and its high expression in the adult mouse lung (Anderson et al., 1995). We summarised the diverse array of cellular processes regulated by KLF2 such as cell differentiation, migration, coagulation and tissue development (Kumar et al., 2005), which are all involved in PAH pathogenesis. Studies implicated KLF2 as a key transcriptional regulator of endothelial pro-inflammatory activation (Bhattacharya et al., 2005; SenBanerjee et al., 2004). KLF2 also inhibited endothelial activation and proliferation (Bhattacharya et al., 2005) as well as the expression of endothelin-1, adrenomedullin and angiotensin converting enzyme, all of which increase vascular contractile tone (Dekker et al., 2005).

[0209] Mice with homozygous germline deletions of KLF2 die around day 14 during development due to heart failure preceded by a high cardiac output state (Lee et al., 2006). In contrast, heterozygous mice are viable and fertile (Yeo et al., 2014). KLF2 overexpression in a PH model of hypoxic rats was able to reduce right ventricular systolic pressure (RVSP) while its knock down increased RVSP and reduced the expression of the vasodilator endothelial nitric oxide synthase (eNOS) in normoxia (Dungey et al., 2011).

[0210] The features disclosed in the foregoing description, in the claims and/or in the accompanying drawings may, both separately and in any combination thereof, be material for realizing the invention in diverse forms thereof.

### REFERENCES

[0211] Anderson K P, Kern C B, Crable S C, and Lingrel J B. 1995. Isolation of a gene encoding a functional zinc finger protein homologous to erythroid Kruppel-like factor: identification of a new multigene family. Mol Cell Biol 15(11):5957-5965.

[0212] Austin E D, Ma L, LeDuc C, Berman Rosenzweig E, Borczuk A, Phillips J A, 3rd, et al. Whole exome sequencing to identify a novel gene (caveolin-1) associated with human pulmonary arterial hypertension. Circ Cardiovasc Genet. 2012; 5(3):336-43.

[0213] Barrios-Rodiles M, Brown K R, Ozdamar B, Bose R, Liu Z, Donovan R S, Shinjo F, Liu Y, Dembowy J, Taylor I W et al. 2005. High-throughput mapping of a dynamic signaling network in mammalian cells. Science 307(5715):1621-1625.

[0214] Berlanga J J, Santoyo J, and De Haro C. 1999. Characterization of a mammalian homolog of the GCN2 eukaryotic initiation factor 2alpha kinase. Eur J Biochem 265(2):754-762.

[0215] Best D H, Sumner K L, Austin E D, Chung W K, Brown L M, Borczuk A C, et al. EIF2AK4 mutations in pulmonary capillary hemangiomatosis. Chest. 2014; 145(2):231-6.

[0216] Bhattacharya R, Senbanerjee S, Lin Z, Mir S, Hamik A, Wang P, Mukherjee P, Mukhopadhyay D, and Jain M K. 2005. Inhibition of vascular permeability factor/vascular endothelial growth factor-mediated angiogenesis by the Kruppel-like factor KLF2. J Biol Chem 280(32):28848-28851.

[0217] Chandra S M, Razavi H, Kim J, Agrawal R, Kundu R K, de Jesus Perez V, Zamanian R T, Quertermous T, and Chun H J. 2011. Disruption of the apelin-APJ system worsens hypoxia-induced pulmonary hypertension. Arterioscler Thromb Vase Biol 31(4):814-820.

[0218] Chaouat A, Coulet F, Favre C, Simonneau G, Weitzenblum E, Soubrier F, et al. Endoglin germline mutation in a patient with hereditary haemorrhagic telangiectasia and dexfenfluramine associated pulmonary arterial hypertension. Thorax. 2004; 59(5):446-8.

[0219] Chida A, Shintani M, Nakayama T, Furutani Y, Hayama E, Inai K, et al. Missense mutations of the BMPR1B (ALK6) gene in childhood idiopathic pulmonary arterial hypertension. Circ J. 2012; 76(6):1501-8.

[0220] Clipson A, Wang M, de Leval L, Ashton-Key M, Wotherspoon A, Vassiliou G, Bolli N, Grove C, Moody S, Escudero-Ibarz L et al. 2015. KLF2 mutation is the most frequent somatic change in splenic marginal zone lymphoma and identifies a subset with distinct genotype. Leukemia 29(5):1177-1185.

[0221] Dekker R J, van Thienen J V, Rohlena J, de Jager S C, Elderkamp Y W, Seppen J, de Vries C J, Biessen E A, van Berkel T J, Pannekoek H et al. 2005. Endothelial KLF2 links local arterial shear stress levels to the expression of vascular tone-regulating genes. Am J Pathol 167(2):609-618.

[0222] Deng Z, Morse J H, Slager SL, Cuervo N, Moore K J, Venetos G, et al. Familial primary pulmonary hypertension (gene PPH1) is caused by mutations in the bone morphogenetic protein receptor-II gene. Am J Hum Genet. 2000; 67(3):737-44.

[0223] de Jesus Perez V A, Yuan K, Lyuksyutova M A, Dewey F, Orcholski M E, Shuffle E M, et al. Whole-Exome Sequencing Reveals TopBP1 as a Novel Gene in Idiopathic Pulmonary Arterial Hypertension. Am J Respir Crit Care Med. 2014; 189(10):1260-72.

[0224] den Dunnen J T, Dalgleish R, Maglott D R, Hart R K, Greenblatt M S, McGowan-Jordan J, Roux A F, Smith T, Antonarakis S E, Taschner P E et al. 2016. HGVS Recommendations for the Description of Sequence Variants: 2016 Update. Hum Mutat 37(6):564-569.

[0225] Dungey A, Deng Y, Yin J, Rozowsky S, and Stewart D J. 2011. Abstract 17982: Krüppel-Like Transcription Factor-2 Preserves Endothelial Function and Protects Against Pulmonary Hypertension. Circulation 124(Suppl 21):A17982.

[0226] Ehlken N, Lichtblau M, Klose H, Weidenhammer J, Fischer C, Nechwatal R, Uiker S, Halank M, Olsson K, Seeger W et al. 2016. Exercise training improves peak oxygen consumption and haemodynamics in patients with severe pulmonary arterial hypertension and inoperable chronic thrombo-embolic pulmonary hypertension: a prospective, randomized, controlled trial. Eur Heart J 37(1):35-44.

[0227] Eichstaedt C A, Song J, Benjamin N, Harutyunova S, Fischer C, Grurug E, and Hinderhofer K. EIF2AK4 mutation as “second hit” in hereditary pulmonary arterial hypertension. Respir Res. 2016; 17(1):141.

[0228] Eichstaedt C A, Song J, Rodriguez Viales R, Pan Z, Benjamin N, Fischer C, Hoeper M, Ulrich S, Hinderhofer K, and Grünig E. First identification of Krüppel-like factor 2 mutation in heritable pulmonary arterial hypertension. Clin Sci. 2017; 131(8):689-698.

[0229] Evans J D, Girerd B, Montani D, Wang X J, Galie N, Austin E D, et al. BMPR2 mutations and survival in pulmonary arterial hypertension: an individual participant data meta-analysis. Lancet Respir Med. 2016; 4(2):129-37.

[0230] Eyries M, Montani D, Girerd B, Perret C, Leroy A, Lonjou C, et al. EIF2AK4 mutations cause pulmonary veno-occlusive disease, a recessive form of pulmonary hypertension. Nat Genet. 2014; 46(1):65-9.

[0231] Forbes S A, Beare D, Gunasekaran P, Leung K, Bindal N, Boutselakis H, Ding M, Bamford S, Cole C, Ward S et al. 2015. COSMIC: exploring the world's knowledge of somatic mutations in human cancer. Nucleic Acids Res 43(Database issue):D805-811.

[0232] Frydman N, Steffann J, Girerd B, Frydman R, Munnich A, Simonneau G, et al. Pre-implantation genetic diagnosis in pulmonary arterial hypertension due to BMPR2 mutation. Eur Respir J. 2012; 39(6):1534-5.

[0233] Galiè N, Humbert M, Vachiery J L, Gibbs S, Lang I, Torbicki A, et al. 2015 ESC/ERS Guidelines for the diagnosis and treatment of pulmonary hypertension: The Joint Task Force for the Diagnosis and Treatment of Pulmonary Hypertension of the European Society of Cardiology (ESC) and the European Respiratory Society (ERS): Endorsed by: Association for European Paediatric and Congenital Cardiology (AEPC), International Society for Heart and Lung Transplantation (ISHLT). Eur Heart J. 2016; 37(1):67-119.

[0234] Girerd B, Montani D, Coulet F, Sztrymf B, Yaici A, Jais X, Tregouet D, Reis A, Drouin-Garraud V, Fraisse A et al. 2010. Clinical outcomes of pulmonary arterial hypertension in patients carrying an ACVRL1 (ALK1) mutation. Am J Respir Crit Care Med 181:851-861.

[0235] Girerd B, Coulet F, Jais X, Eyries M, Van Der Bruggen C, De Man F, et al. Characteristics of pulmonary arterial hypertension in affected carriers of a mutation located in the cytoplasmic tail of bone morphogenetic protein receptor type 2. Chest. 2015; 147(5):1385-94.

[0236] Girerd B, Montani D, Jais X, Eyries M, Yaici A, Sztrymf B, et al. Genetic counselling in a national referral centre for pulmonary hypertension. Eur Respir J. 2016; 47(2):541-52.

[0237] Gómez J, Reguero J R, Alvarez C, Junquera M R, Arango A, Morís C, Coto E. A Semiconductor Chip-Based Next Generation Sequencing Procedure for the Main Pulmonary Hypertension Genes. Lung. 2015; 193(4):571-4.

[0238] Granzow M, Paramasivam N, Hinderhofer K, Fischer C, Chotewutmontri S, Kaufmann L, et al. Loss of function of PGAP1 as a cause of severe encephalopathy identified by Whole Exome Sequencing: Lessons of the bioinformatics pipeline. Mol Cell Probes. 2015; 29(5):323-9.

[0239] Grünig E, Janssen B, Mereles D, Barth U, Borst M M, Vogt I R, et al. Abnormal pulmonary artery pressure response in asymptomatic carriers of primary pulmonary hypertension gene. Circulation. 2000; 102(10):1145-50.

[0240] Grünig E, Weissmann S, Ehlken N, Fijalkowska A, Fischer C, Fourme T, et al. Stress Doppler echocardiography in relatives of patients with idiopathic and familial pulmonary arterial hypertension: results of a multicenter European analysis of pulmonary artery pressure response to exercise and hypoxia. Circulation. 2009; 119(13):1747-57.

[0241] Grünig E, Barner A, Bell M, Claussen M, Dandel M, Dumitrescu D, et al. Non-invasive diagnosis of pulmonary hypertension: ESC/ERS Guidelines with Updated Commentary of the Cologne Consensus Conference 2011. Int J Cardiol. 2011;154 Suppl 1:S3-12.

[0242] Harrison R E, Flanagan J A, Sankelo M, Abdalla S A, Rowell J, Machado R D, et al. Molecular and functional analysis identifies ALK-1 as the predominant cause of pulmonary hypertension related to hereditary haemorrhagic telangiectasia. J Med Genet. 2003; 40(12):865-71.

[0243] He H, Singh I, Wek S A, Dey S, Baird T D, Wek R C, and Georgiadis M M. 2014. Crystal structures of GCN2 protein kinase C-terminal domains suggest regulatory differences in yeast and mammals. J Biol Chem 289(21):15023-15034.

[0244] Hinderhofer K, Fischer C, Pfarr N, Szamalek-Hoegel J, Lichtblau M, Nagel C, Egenlauf B, Ehlken N, and Grünig E. 2014. Identification of a new intronic BMPR2-mutation and early diagnosis of heritable pulmonary arterial hypertension in a large family with mean clinical follow-up of 12 years. PLoS One 9(3):e91374.

[0245] Kabata H, Satoh T, Kataoka M, Tamura Y, Ono T, Yamamoto M, et al. Bone morphogenetic protein receptor type 2 mutations, clinical phenotypes and outcomes of Japanese patients with sporadic or familial pulmonary hypertension. Respirology. 2013; 18(7):1076-82.

[0246] Kabitz H J, Schwoerer A, Bremer H C, Sonntag F, Walterspacher S, Walker D, et al. Impaiiiiient of respiratory muscle function in pulmonary hypertension. Clin Sci (Lond). 2008; 114(2):165-71.

[0247] Kim J. 2014. Apelin-APJ signaling: a potential therapeutic target for pulmonary arterial hypertension. Mol Cells 37(3):196-201.

[0248] Kumar A, Lin Z, SenBanerjee 5, and Jain M K. 2005. Tumor necrosis factor alpha-mediated reduction of KLF2 is due to inhibition of MEF2 by NF-kappaB and histone deacetylases. Mol Cell Biol 25(14):5893-5903.

[0249] Kwapiszewska G, Rodriguez Viales R, Ehlken N, Eichstaedt C, Riemkasten G, Grunig G, et al. Epigenetik and Genetik der pulmonal arteriellen Hypertonie—neue Erkenntnisse der letzten Jahre. Dtsch Med Wochenschr. 2014;139(S 04):111-5.

[0250] Lane K B, Machado R D, Pauciulo M W, Thomson J R, Phillips J A, 3rd, Loyd J E, et al. Heterozygous gennline mutations in BMPR2, encoding a TGF-beta receptor, cause familial primary pulmonary hypertension. Nat Genet. 2000; 26(1):81-4.

[0251] Larkin E K, Newman J H, Austin E D, Hemnes A R, Wheeler L, Robbins I M, et al. Longitudinal analysis casts doubt on the presence of genetic anticipation in heritable pulmonary arterial hypertension. Am J Respir Crit Care Med. 2012; 186(9):892-6.

[0252] Lee J S, Yu Q, Shin J T, Sebzda E, Bertozzi C, Chen M, Mericko P, Stadtfeld M, Zhou D, Cheng L et al. . 2006. Klf2 is an essential regulator of vascular hemodynamic forces in vivo. Dev Cell 11(6):845-857.

[0253] Lek M, Karczewski K J, Minikel E V, Samocha K E, Banks E, Fennell T, O'Donnell-Luria A H, Ware J S, Hill A J, Cummings B B, et al. Analysis of protein-coding genetic variation in 60,706 humans. Nature. 2016; 536(7616):285-291.

[0254] Levy M, Eyries M, Szezepanski I, Ladouceur M, Nadaud S, Bonnet D, et al. Genetic analyses in a cohort of children with pulmonary hypertension. Eur Respir J. 2016; 48(4):1118-26.

[0255] Lyle M A, Fenstad E R, McGoon M D, Frantz R P, Krowka M J, Kane G C, and Swanson K L. Pulmonary Hypertension in Hereditary Hemorrhagic Telangiectasia. Chest. 2016; 149(2):362-371.

[0256] Machado R D, Southgate L, Eichstaedt C A, Aldred M A, Austin E D, Best D H, et al. Pulmonary Arterial Hypertension: A Current Perspective on Established and Emerging Molecular Genetic Defects. Hum Mutat. 2015; 36(12):1113-27.

[0257] Miller S A, Dykes D D, and Polesky H F. 1988. A simple salting out procedure for extracting DNA from human nucleated cells. Nucleic Acids Res 16(3):1215.

[0258] Montani D, Achouh L, Dorfmüller P, Le Payee J, Sztiymf B, Tcherakian C, Rabiller A, Haque R, Sitbon O, Jais X et al. 2008. Pulmonary veno-occlusive disease: clinical, functional, radiologic, and hemodynamic characteristics and outcome of 24 cases confirmed by histology. Medicine (Baltimore) 87(4):220-233.

[0259] Montani D, Lau E M, Dorfmuller P, Girerd B, Jais X, Savale L, Perros F, Nossent E, Garcia G, Parent F et al. 2016. Pulmonary veno-occlusive disease. Eur Respir J 47(5):1518-1534.

[0260] Nagel C, Henn P, Ehiken N, D'Andrea A, Blank N, Bossone E, Bottger A, Fiehn C, Fischer C, Lorenz H M et al. 2015. Stress Doppler echocardiography for early detection of systemic sclerosis-associated pulmonary arterial hypertension. Arthritis Res Ther 17:165.

[0261] Narasimhan J, Staschke K A, and Wek R C. 2004. Dimerization is required for activation of eIF2 kinase Gcn2 in response to diverse environmental stress conditions. J Biol Chem 279(22):22820-22832.

[0262] Nasim M T, Ghouri A, Patel B, James V, Rudarakanchana N, Morrell N W, et al. Stoichiometric imbalance in the receptor complex contributes to dysfunctional BMPR-II mediated signalling in pulmonary arterial hypertension. Hum Mol Genet. 2008; 17(11):1683-94.

[0263] Newman J H, Wheeler L, Lane K B, Loyd E, Gaddipati R, Phillips J A, 3rd, et al. Mutation in the gene for bone morphogenetic protein receptor II as a cause of primary pulmonary hypertension in a large kindred. N Engl J Med. 2001; 345(5):319-24.

[0264] Padyana A K, Qiu H, Roll-Mecak A, Hinnebusch A G, and Burley S K. 2005. Structural basis for autoinhibition and mutational activation of eukaryotic initiation factor 2alpha protein kinase GCN2. J Biol Chem 280(32):29289-29299.

[0265] Pfarr N, Szamalek-Hoegel J, Fischer C, Hinderhofer K, Nagel C, Ehlken N, et al. Hemodynamic and clinical onset in patients with hereditary pulmonary arterial hypertension and BMPR2 mutations. Respir Res. 2011; 12:99.

[0266] Piao C, Zhu Y, Zhang C, Xi X, Liu X, Zheng S, Li X, Guo J, Jia L, Nakanishi T, Cai T, Gu H, Du J. Identification of multiple ACVRL1 mutations in patients with pulmonary arterial hypertension by targeted exome capture. Clin Sci (Lond). 2016; 130(17):1559-69.

[0267] Piva R, Deaglio S, Fama R, Buonincontri R, Scarfo I, Bruscaggin A, Mereu E, Serra S, Spina V, Brusa D et al. 2015. The Krüppel-like factor 2 transcription factor gene is recurrently mutated in splenic marginal zone lymphoma. Leukemia 29(2):503-507.

[0268] Remillard C V, Tigno D D, Platoshyn O, Burg E D, Brevnova E E, Conger D, et al. Function of Kv1.5 channels and genetic variations of KCNA5 in patients with idiopathic pulmonary arterial hypertension. Am J Physiol Cell Physiol. 2007; 292(5):C1837-53.

[0269] Richards S, Aziz N, Bale S, Bick D, Das S, Gastier-Foster J, et al. Standards and guidelines for the interpretation of sequence variants: a joint consensus recommendation of the American College of Medical Genetics and Genomics and the Association for Molecular Pathology. Genet Med. 2015; 17(5):405-24.

[0270] Rodriguez Viales R, Eichstaedt C A, Ehlken N, Fischer C, Lichtblau M, Grünig E, et al. Mutation in BMPR2 Promoter: A ‘Second Hit’ for Manifestation of Pulmonary Arterial Hypertension? PLoS One. 2015; 10(7):e0133042.

[0271] Schroeder C, Faust U, Sturm M, Hackmann K, Grundmann K, Harmuth F, et al. HBOC multi-gene panel testing: comparison of two sequencing centers. Breast Cancer Res Treat. 2015; 152(1):129-36.

[0272] SenBanerjee S, Lin Z, Atkins G B, Greif D M, Rao R M, Kumar A, Feinberg M W, Chen Z, Simon D I, Luscinskas F W et al. 2004. KLF2 Is a novel transcriptional regulator of endothelial proinflammatory activation. J Exp Med 199(10):1305-1315.

[0273] Shintani M, Yagi H, Nakayama T, Saji T, Matsuoka R. A new nonsense mutation of SMAD8 associated with pulmonary arterial hypertension. J Med Genet. 2009; 46(5):331-7.

[0274] Song J, Eichstaedt C A, Rodriguez Viales R, Benjamin N, Harutyunova S, Fischer C, Grünig E, and Hinderhofer K. 2016. Identification of genetic defects in pulmonary arterial hypertension by a new panel diagnostic. Clin Sci (Lond) 22:2043-2052.

[0275] Soubrier F, Chung W K, Machado R, Grünig E, Aldred M, Geraci M, et al. Genetics and genomics of pulmonary arterial hypertension. J Am Coll Cardiol. 2013;62(25 Suppl):D13-21.

[0276] Sztrymf B, Yaici A, Girerd B, Humbert M. Genes and pulmonary arterial hypertension. Respiration. 2007; 74(2):123-32.

[0277] Tenorio J, Navas P, Barrios E, Fernandez L, Nevado J, Quezada C A, et al. A founder EIF2AK4 mutation causes an aggressive faun of pulmonary arterial hypertension in Iberian Gypsies. Clin Genet. 2014; 88(6):579-83.

[0278] The 1000 Genomes Project Consortium, Auton A, Brooks L D, Durbin R M, Garrison E P, Kang H M, Korbel J O, Marchini J L, McCarthy S, McVean G A et al. 2015. A global reference for human genetic variation. Nature 526(7571):68-74.

[0279] Torring P M, Brusgaard K, Ousager L B, Andersen P E, and Kjeldsen A D. National mutation study among Danish patients with hereditary haemorrhagic telangiectasia. Clin Genet. 2014; 86(2):123-133.

[0280] Trembath R C, Thomson J R, Machado R D, Morgan N V, Atkinson C, Winship I, et al. Clinical and molecular genetic features of pulmonary hypertension in patients with hereditary hemorrhagic telangiectasia. N Engl J Med. 2001; 345(5):325-34.

[0281] Wallis Y, Payne S, McAnulty C, Bodmer D, Sistermans E, Robertson K, et al. Practice Guidelines for the Evaluation of Pathogenicity and the Reporting of Sequence Variants in Clinical Molecular Genetics. ACGS/VKGL. 2013.

[0282] Wang G, Knight L, Ji R, Lawrence P, Kanaan U, Li L, et al. Early onset severe pulmonary arterial hypertension with ‘two-hit’ digenic mutations in both BMPR2 and KCNA5 genes. Int J Cardiol. 2014; 177(3):e167-9.

[0283] Xi Q, Liu Z, Zhao Z, Luo Q, Huang Z. High Frequency of Pulmonary Hypertension-Causing Gene Mutation in Chinese Patients with Chronic Thromboembolic Pulmonary Hypertension. PLoS One 2016; 11: e0147396.

[0284] Yeo J C, Jiang J, Tan Z Y, Yim G R, Ng J H, Goke J, Kraus P, Liang H, Gonzales K A, Chong HC et al. 2014. Klf2 is an essential factor that sustains ground state pluripotency. Cell stem cell 14(6):864-872.

The application's sequence listing, which the Patent Office published only in electronic form, follows.

SEQUENCE LISTING (109 sequences)

SEQ ID NO: 1 - DNA, 17654 bp, Homo sapiens
agaggtgtcactagcctacggtaacacaaccagcctgcattcctagtaggtagtttgacttcagagtctctgtggataaccaggaggctaggactaagaccagagtcctgcaggtacttagatggttggagcaaagcagggcagtgaggtcagtgctcccagcctgtgcaggagcatcaggaagagtctgtgtccccctcccctgccggtatgaagccattctgcttccctccccagctgccttgtgtcagcagagttccagggaggctccattccccacctctatctaaagctccatttgctggggtgggggccctgcctggaaggggaaggtccaaggctgctcccagcgtgtccctccatcctgactgtccctggcggggcgggggtgtctttgtcacccagctgcacaacggccaggaagggctcaaaccatcctcagggctaacccaaggccgtcctctgggcctgtatacccctgtgctgagtgcggatcgggagaggctgctgaagacaggaggggacaaatgggggacgaaggggcccgagggaggggactgaaggatttgggccaagtcgggagttcccgagggcggagtcaaaacgcatctggattttgctagccccaaactctgccctcattgctgcaagcctcctagaccgaggacccccgggctgagggtggggtaaggataggtagtgtccctccccgtcccacccccgcctgtcccttcctcggtggccccttcccggcgccccgattccaggcggcccctccgctgctgccagccgatccccctctacccccacccactactccggccgccagacgttgcctacagtctcggctctgtctcccacggctgtgggtccggaccccacgggacccctatgggacccccacaggacccccacggcctgagtccaaggcccgccccctcggggaggcggatgtgggaggcccggcccgggtgcgggccagcgacccgggagctgcgggcggctgggaggggaggccgccctgaggggctgggagcggcgcgggggtgggtcccggtcctgcagccccagcgaggggcgagcggcggccagtcggcgagctgggcaataaggaaacggtttattaggagggagtggtggagctgggccaggcaggaagacgctggaataagaaacatttttgctccagcccccatcccagtcccgggaggctgccgcgccagctgcgccgagcgagcccctccccggctccagcccggtccggggccgcgcccggaccccagcccgccgtccagcgctggcggtgcaactgcggccgcgcggtggaggggaggtggccccggtccgccgaaggctagcgccccgccacccgcagagcgggcccagaggtgagtcgaggtccgcggacgggaccgggtggcgggcggcctgacccccgcttcagtgggcccttccttcgggcggaccccagagtcaccgcagagtggtcgcgggaggctcagtcccagctcattagaaaggcaagctgctcctggctgaccacgcacagctcccatgaccctacctgagacttggaggggaatggacgagactggactggaaatcagaaacttggttctagtcgggtgacctggggtcagtgacttcacttctctgttctcctaccctcttcataaaatgggcagtgggattcctgtcttgctctactcacatagaagggatcacacgtcctccaggccgctgggtggacctggagtgaatgcctacttccacagctgttgagcctcccagcagagctcacctttcccagatcagtccttccagctgttgcttgaggaatctgacactatcactccaacctaggagtctcaccctaggcgcgcatggtcagtcacctccttgccacgaccttccttcaggatccaggccaaaggggatcccagtctccccccaggctgggaccccagatttttccatggaggccagtgctgtgaaacccatggctgggctggctgccccagctcctctttccttctccaaggacaggggcataatggacagttgctctcactctctctatgtatggccagcttctggctgagtcagggtctgtcctaatacctgtcctctcacctgtccccccatttcattggtttgttagaaatagctaccattgattgagtactaactatgtagacacttagatatatatattttttctcatgtaatcctggccgcaacctagtggaagaggggttactatccccttcctacagaaaaggaaacagacatgaatatgggacttgtccaaaactccttggatggtggggtgaatggcatggttggggtcttgataacatttcagtgcttactgtgtactacttatactctgctaaataattgtactacattttacctatgagataacactattattattcccactttacatatgatgggaagcctaagcctcagaaagtttaagtaacgtctcaaatttcatacctctaagtggcaaaggcaggatttgaacccaggtctccatgctccagagcccacaccctaacctctgtgctacactgtgctgcctccatggtctgcctgagacctgaaaatccaggcatcacctggatgttccactgcatcaccccgctgtgaagggctaataaatcacatggatgaatcgtaagggcaacccaatatgaacagctgggtctgctcctctgctgttggggtaaggcctactgaagtgcagagtgagtccagaaggttgtgcttgatatggcgcttctccagccctgtgaagatcactgctgtgctgagccactgccgttgatgggagtaggttttatcaatccttcaggtgtgctagggagaaaaacattgataagcacctttcgggcataccactactctggctctccccacctgaggctcagactttgactaagcctatggcaaacagatgatttctgggcagcaacaccacctttgttgcctgggtcaacatagtgagaccctatctctactaaaaataaaactgggcatggtgctgcacccctgtagtcccttgggacttgggaggctgaggtgggaggatcacttgagcccaggagttcaaggctacagtgagctatgattgcaccactgcactccagcctgggcgactgagcaagaccctgtctcaaaaaaaattaaaaacaaacaaaaacgctgtcttcatttaaacaaatctgagtagggcacccgttaataacaacagtagtgggcaatttgtacacgtccaccgagacccatgtctttttcttcctttgagggactcatctaaccccaaacaactggaggaataacaatgaccaaggaatgatttattatcagcaatttaagtttattaagacacgctcagtgactatggacaagaaactgaacatctctgagcctcactttcccccgttggactgttgtgatgattaaatcagataaaccattcaagttcagtacttagcacataattagtactcagagaaggttaactgttattattaagtatttcatagtgtttagctaacgtttgaaattagtttaacgtctgtaatttctggccaacaatagtgatgcttctgtcagcaggagatctttcacaaagttttgcttagaagtgaaaggatcctgccaggccccaggagtctgtctgtgctacagtcagatttcagggtaaatcgtacagagtcagctctgagtttggactggtcgggactcagcatcctcctgtacttgatctcacactgggtccagttaaaaattggacagtcccaattttactccatcacattcccaggattagaccatagatgggttctgcagatgcagacagcctcgctccacagtgtcaccacgtcccagctttggtgtttacccttggctgtcccttctgtagtagatggggagtatcctgggtgggagtgagtgtcccctccctctgcatcccactcccactcacccagcagggccctgtacagcaaaatgaaagcagaggaaccagacttagcgttgtgcccacacaaactgatcagaactccctggggaacttttaaaaaatgcatgtttcttgctgattccaggactgaatcagagtctggagtgagggtgaaaccagtgaatatgcttttctcagtgagcacttcaggtgattctgatgcgtgataaagtagaaggagggtggactggggcacggccagagaagtagaggtacggacagaggatcctagaggaatgccggattttagccttattgttagccactttttcctttccacctcaaaccctctcctttgcagctttctgggctagcaaaggctgccaaggatggcttcctgctagtaccccagtgggcagattcagctcctctagggtgctctctccatcccatcccaccgtcagtcctgccgcacagtgctagccagagtcctcactggctgcgggaggggcaagaggcaggaggtcaggcagaggctggggacacagctgcagcagcccagggctctgtttcctcccccagcctgggcctctggggcagaggaagcccaggcaggaaggccaggcctgccaccagccagagaggcctatgaagcccccctaccccacccctagccatactgccctcagagcctcagcatcttgggtcttcatttggcaccattcttagactatgggctttctgaagcctctgtggccatgtgcccagccctgtcaggctcaccatgtcatgccaaaggacagtctccctgccttgtgccctgcctgaggatccagtccccagacacacacctgcacatgctccaccattcagaaagtcctgttgctgtctgaccagggtccttcttgctgcagctttagccaatatcttctggttctaaacctgtgagaaatgaagactgggtggcttcagaagcactagttggtgtgggacctggattggggactatcatagaccagaattactccccctaacactctccaacaaacttctggaaaagttcaaccctagtcagccatggaaggtcaaacattcagtgtctaagtgtgtttcacttcccctgccacatcactggccctccacccaccctttcctagatggcaaggggaaagaagggggccagggaacagctccgagagggcagcttatactctggtgagcttgcagagaggtttctctacacctggcatgaccctgccccgtccgagctttgcatggttgttatagccctgagggctcagacatgggctgccaccactggatagggacagagcgaagagagcacttgattaggagtctggaaacctgggatgtacgcctgctggtgccagtgagtcctgtctgacccgggacaagtcttcttccctgtatgagccttactcctctcttctgtaaaacaaggagctggattttgtgattcacaggatgtccacctagaattctgtcatgtgggtgtcccaggcacaaggaactaagggtagcaaggaactaagggcatatttaaaaagcccctccagaccttgtggctgctgcagcccaccctgaaaatatgccctcagttccctgctgtgcgtgactcctgcctgttctatccagaccccaatctaaacaatcttgattcctgttcctggcttggcaggaccctgaatggcaggaagcgaagacaggagcctgtttatgtttgaggcagccagggctgggggggcattgagaaagggtaggcaggggtggaagctgtgagggagtgggaaagagacacagaacagaaggggagctgctggagagatgctccttctaccccaattgggtgctccctgcggctctcccaacctgcctgcagtctgagctcagcagcaggagtgcagagctagggtttccccaagctctcagtcacttaaacattgctctccacccttcacctctaacaggatggtttccatggggaagtgaaccaggacttcccctgcaggccccgccccaaagccaggcggcagggagtagggaggcggcctccctgcctcccctccaaaaaaaactctgtgatttcctctgggcaggagggagccacggccagcggctgtcacacttcatggctcttactccacctctcttgctcctctctgcagggaccatgaccttgggctcccccaggaaaggccttctgatgctgctgatggccttggtgacccagggtgagtactgggggagcagttaggaaacaggaacctggatacagaaagggctatctgggcccagatcagctctgcctggggctgaacttgagaagctggggagaatgtaggagcttgactggagagtggaggacagtgaggctccattagactcagtccccagctaccccagccctcctttgctctcctcttgatccagacctgcaggctggagctctgtcagactagggtggaagcctatatgtggggtggagggagagcaggtgttggcaggccaagcctgggagagcactcagggctggggctgggggcccagcccagcctagaactgggaggggaggacctaggagccaggaggggacaaaagcctgcttttcagagtgtcagctgctctgaggggagggttctgagggaaggatgactgaggatgaaagtaagagaccaaagcttcaaggtgtttgtctgaggggtcagacgagagggacagtaggacagaaatgggtgtcgggctcagcctgggggagctgggaccacagtggctgagcttccggtgtgtcttccaggagaccctgtgaagccgtctcggggcccgctggtgacctgcacgtgtgagagcccacattgcaaggggcctacctgccggggggcctggtgcacagtagtgctggtgcgggaggaggggaggcacccccaggaacatcggggctgcgggaacttgcacagggagctctgcagggggcgccccaccgagttcgtcaaccactactgctgcgacagccacctctgcaaccacaacgtgtccctggtgctggagggtacgtccagctgccctagcactccctccccatcttcttggcccctgccctcccttccctcctttcctctcatgctctggccaataaaggggctgggggcgggggagcgggtgggcaggactctgggatctaactggcagagtggtctggcccgaggtggggggagctgacctagtggaagctgagcctcagtgtccccctccctcagccacccaacctccttcggagcagccgggaacagatggccagctggccctgatcctgggccccgtgctggccttgctggccctggtggccctgggtgtcctgggcctgtggcatgtccgacggaggcaggagaagcagcgtggcctgcacagcgagctgggagagtccagtctcatcctgaaagcatctgagcagggcgacagcatgttgggggtatgggcctggggacctgggacacagggtgtaggaggggcagataggaactgcagaatcagaggggtcacccagagattagagccggtggggagctgggcgagtgaggagcttgcagtgacccagcaggtcccaggtcgaggatagagaagggggctgtggctggttgtggcagcctctcagtggcctctccgtacccccaggacctcctggacagtgactgcaccacagggagtggctcagggctccccttcctggtgcagaggacagtggcacggcaggttgccttggtggagtgtgtgggtgagcagtgggtgagcccggtggatgaggaccaagggctctcatgagcctggaggggtgagggagtttttggctactggaatcacaggcggtgccaggcctgggtcagaattggaattctgctgggcagggagtgggctggagacgggccagggctaggttcttctttctgcaggaccggggtggaacgagaggcagctgggggtggcctgccactgggtttgggtctggattaagttaaacctaagggtctggggttctgtgggtggggtgggcgagggaggcagcgcagcatcaagatggggggctcttccagggctctgtgtgcccagtgtgtaaccctcaccttcccctctggccatcaggaaaaggccgctatggcgaagtgtggcggggcttgtggcacggtgagagtgtggccgtcaagatcttctcctcgagggatgaacagtcctggttccgggagactgagatctataacacagtgttgctcagacacgacaacatcctaggcaaggggagaggccagctgtgccaggcctggggctttgcccccctgcactcagggctcaagtttgcagacctccagacattaacagaaccctgaaggactctcagcccacctgcagcatcaacctctttttttaatttaatttaatttaatttaatttaatttaatttaatttaatttttgagacagggcctcgctctgtcacccaggctgggatgcagtggtgcaatctcactggagcctcaatctcttgagctcaagtgatcctcccacttcagcctcttgagtagctgggaccacaggcatgtgccaccatgcccagctaacttttttattttttgtagagacgaggtctccctatgtttcccagactggtctcaaattcctaggctcaagcagtgctcttgccttggcctcccaaagtgttgggattacaggtgcaagccactaagccaggcccagacccaacctctgactccagctctgtctctgacctaagccacatcaacccccacccccagacctagcttagcagtgacccagtccattccctctcccccaaccccaccctgaccctgacgactccagcctcccttagccccagccccttggctgagtcacccaacctttctgcacacaggcttcatcgcctcagacatgacctcccgcaactcgagcacgcagctgtggctcatcacgcactaccacgagcacggctccctctacgactttctgcagagacagacgctggagccccatctggctctgaggctagctgtgtccgcggcatgcggcctggcgcacctgcacgtggagatcttcggtacacagggcaaaccagccattgcccaccgcgacttcaagagccgcaatgtgctggtcaagagcaacctgcagtgttgcatcgccgacctgggtgagccgggcggggcaggggcgcgcccttcacaggtgggcggagcttgtgcgctctcctctcctttgcctgtgggcggtgaccatgattagcacttgaaaatttagaggtgcatgttgtttcagttctcctccgcaagaccccacgagttgtctgaacacccttttcaaacccagattccttccaccataccatcctggctccaggagttgggagaaaggaggcaggagccaggaacctgggttctcatcctggtttcgccagcctccaggtctgctctgtgaagtgggctcataatgcctgccttgcccactcacatctcgctgggttcttgggaacctagagagcactacacaagcaaagagtacctggggccatggttctctctgtggccactgccttccagcccatctccgtgcacgtctccatctgccttcccctctctgtcccactgtttctctcagtccccaccttgcctgccccctggatcccaggtttgggagaggggcaggagtgacaggcctcacccccacaggcctggctgtgatgcactcacagggcagcgattacctggacatcggcaacaacccgagagtgggcaccaagcggtacatggcacccgaggtgctggacgagcagatccgcacggactgctttgagtcctacaagtggactgacatctgggcctttggcctggtgctgtgggagattgcccgccggaccatcgtgaatggtgagggcccaccctacacagggtagggaaaggggaatcagcctgtggagccaggggcttccagccatggccagtgcccatggcctgggaggtttgcagtcagacctcctggcaccccttccatgctgcccaccagctggttcagctgagtgaccttttaaggtataaaccttaaaaacagataacagggtctgtgagtctggctgtgaaatcttgggtacatgataataacagaaatattaatagcagctaatattgattgagcttaaatatgtgccagatgccatgctatgcactttacatgtattatttaattctttggtatggacaaggcagtggtattgcttagtggctaagagcataggcttggaatcagacttcctgggttctattcctgatcttgccatgaccgtgcgtaggttatttgacctctctgtgcctcagcttcctcatttgtaaaatgggtgcgatggctcatgcctgtaatcccagcactttgggaggccgaggcaggcagatcacctgaggtcaggaattcaagaccagcctggccaacatggcgaaaccctgtctgtactaaaaatacaaaaattagctggctgtggtggcacacacctgtaatcccagctactcgggaggctgaggcaggagaatcacttgaatctaggaggcagaggttgcggtgagccaagatcatgccactgcactccagtctgggcgacagagtgagaccctgtctcaaaaaaagaaaatttattaaaataaataaataaaatgagaataaaaatagcttccagttgttgagataatctaagtatttagaacagtatctagagctaaatattagtggctgttattgttgtagatagaatgagtgcctgacatcatattgtccccattttacagttgaggagacgggggcacagaatgacagtgggcttgaggcagcatcagggtccgaaaccgggcagtctgccccggggccagtgctcatcatcactgtgtgcacttaaacctctctggcccttgatttcctcatgcacgcaatgcatgtgagtgcctgcactgcctgcttattgctgcctggttgttactgtgggttgccacaggggactctgatttagagggactgcgacaggtagagagacctgccctgggcaggcagccctgaggtcgatgttctctcagccctggagtggacggaggataggtgggtcgtctagactggtgggagcattgtcaacctttgaggaggctgtccatggtgagggacttccaggagtcgtgacaggttggggacaatcctcaggatatggctggagccctgcttcttggggacaaggatgtcctcatttcctgagcatctaccaggagccagccccatgccagacttcatttgtcctcggtggtcatcaactgaaaacagaggctgtggtgtcaccggtcccttggggagactcacgaggtgcttagattcctcaagactccgggcatgaattgccagagtgggctctaaggagaccgggatcgggggaaagaggaacctggaagaagccaaggctccttggaccaggctgcagggcagaaaggaaaggctgggaggaggctgcctggggtggagggggaagctccatcagccccacacggactcgcggcgcattataaacactgtaatctggtgtcagccccggcactgattaaaggcccattagacacattcaggcctctgtgcagcactgattagggcgtgagcggcacaggggccggcctggaagctggccatggggagaacagctggcgaaggctctatcgaggttgcggcctgtgtggccatggcccccagcctcaggctgggaaacaggatggggcacggggctgtctgcggctccaccggcattgttttcagaaagctcctactaaaaactgtgaacttgggataccaagaggagggggtcagtgctggctgcaggagtcagcagaggcctgtgccatccctgacactgggtgatgttatgtggacctgggtaaaaagataagtgcagctcagaggtcaagagcacatgctttggtgttagactgtgggcttaaatcctagccctgtcacttactatctgttgatcttagacaagtttcttaaactctctggccttcatttcttggcttataaagtggagctcatagtattacctacctcatagggctgctgtgaggatttcatgcagagctcttaggacagcacctggcatacagtgctcagtaaacatttggtgttattattatcaggcatgtgtgatagttggggcctgggagcagtcccgggcactgggtggaaggcagctgagggaagactggaacaaggctggcctaggaatccgagatgggtttgagtcttgcctctgccattactagctgtggaaccttgggccccccttctctgagcatcagtttcttcatctgtaaaatggaggtaatactagtacccaccccacagggctgttgtgaggacaaacaggataaagcatgtaaagtgtttacagcagaatatctggcacatgccatgtgcaaaacaaatggcagtcattaacattagttagaaacacatttattgcattatactgtccctctcaggggtagcgtgtccaggccactggtttctggcccttggatagagggtagaaaaggctctcctctgggtggtattgggcctccttagagtcccaagtgattgtcctgtccattctccatttccaggcatcgtggaggactatagaccacccttctatgatgtggtgcccaatgaccccagctttgaggacatgaagaaggtggtgtgtgtggatcagcagacccccaccatccctaaccggctggctgcagacccggtgaggcctctgctgggactaggatggcgtggggtggtggctcatggctgggatttctgggcccaggaacttgtgtctgaggcctctgcttcatctcatagatactgagtgtcctggttagggcacctctctaggtactccctctttcaaccctggcccatgctccctgcccccagggccatctggtcattctgggattttaagaaccttcaccttccctgtgaaaagtcagaggctatctgtggctctgtgtgtgtgtgtgtgtgtgtgtgtgtgtgtgtgtgtgtgtttgagagtcagggttttgtttgctcttgtcacccaggctggggtgcagtggcacagtcatagctcactgtaacctcaaactcctcggctcaactgatcctactgcctcagcctccccagtagctaggtgtagtgcacaccaccacacctggctaatttttaaaattttttgtagagacaaggtcttttatgttgctcaggcttatctcaaactcttgggctcaagtgatcctcctgcctcagcctcccaaagtgttgggattataggtgtgagcctccacacctgaccactgtggtatttttgttgctatttgtctttgtttgttgctgttttgttgttgtttgtccttgttttttctcaaaacacttcacttgtacaaagacacacacacgtatatcaacacatacaagcgtgaatatccttctgaacatacactcacagaaatatacacatgcgcatatatgccagactgttggccccgtgaggacaaagaacgtgtcttttgctcacccttatgtccctattacctatcatagtatctggctcacaataggtgctaataaatatttactgaaagaatgaatatattctatacatgtatacatctatgtgtacatagacatacatttctgtacaacatatccgcaaaaagccacatgtatgcattcctgtacacacacacatacactcactttcaggagccagaagtggggccagctcatttcaggccctgggatgggttgatgagcttcctgggatgggttgatgagctttttgggatgggttgctccctggacacttgcatttttagggcagttcccacttccacagtcccctgggcccagccatggctgatggaggggctggaagacactgccctctgcactggggtcttaggctgtggatggggatgtgggagcccccaggcttgaagaatcggccccttcctatggatcttggcaaaggtggggatgggggtaaggtgtttcacagacactgcttgcccaagggggcttgagtgctcctgaagatctgagttctctctttctgtccgccctgtctttctccatccctttctcactctactctcttcctcttccattttttatttttttgtcatcctctgttctctctctcaccacttgtctttcctctcgctctcctttccaatgctctcatctccctcctctcatcctttctctcctgcttatgtctccccattaccggccatcctcctcatcttcttcccatcttctctgacccacctccctctgcatctctctcccgaccccctcctcttctctgcatctctctctctgcctcctctcctctgcacctctctcccaacccccaggtcctctcaggcctagctcagatgatgcgggagtgctggtacccaaacccctctgcccgactcaccgcgctgcggatcaagaagacactacaaaaaattagcaacagtccagagaagcctaaagtgattcaatagcccaggagcacctgattcctttctgcctgcagggggctgggggggtggggggcagtggatggtgccctatctgggtagaggtagtgtgagtgtggtgtgtgctggggatgggcagctgcgcctgcctgctcggcccccagcccacccagccaaaaatacagctgggctgaaacctgatcccctgctgtctggcctgctcaaagcggcaggctccctgacgcctggctctctccccacccctatggccagcatggtgcaccccctaccactcccgggacaggatgcaaaagaggctccagagtcagagtgccaagccagggaatcccagtcccagactcagagcccgggcctgcactttgccccctgcccttgatcaaccccactgccccaccagagctgccagggtggcacagggccctgtccagcccctggcacacacttccctgccaggcctcagcctctagcataagctccagagagccagggcccatcagtttctctctgtggatttgtatctcagctccatgatgccttgggctttctgtctcctcaacaagagtgcagcttgctgaatgtcagctgcctgagagagctggggcctgacttactagggcattaaatcctaagaggtcctactgaggtgtggcaggatcacaggccagtggaaaaagggcaggtcagatgggcaaggcccaggactttcagattaactgagaggatatcgaggccaagcatggcagggggaaggtcagtgggtgtcaagagacccaggtctgaccccggatgtttgctccatgtgacaaaagcaggcctgtctcaggaccttttcttttcttttttccttctttttttttttgacacggagtttcgctcttgttgtccaggctagagtgcaatggcatgatcccagctcaccgcaacgtctacctcccaggttcaaatcattctcttgcctcagactcccgagtagctgggattacaggcacatgccaccatgcctggctaattttgtatatttagtagaaacagggtttcaccatgctggccatgctggtctcgaactcctgacctcaggtgttccacctacctcagcctcccaaagtgctggggttacaggtgtgagccatcgcgcctggccaggacctttgtttcttatctacatattggaagatttggtcctgatgtcctttgaggcttctttagctctagttctctgacacttcagcctatatcacagctaacttcttcagtctcatctattccttatgctccagcccctggcaatttgcctcaagatgggggtttgaaaataactttacctgactcaaggagtgtctggagcacctcctagtctaagtctgcaagctccagttcttgcctaaaaccatgccagtggccacccttgggctcagacagctctgggccttttgaccacaagccagcccctcgccctctctgtggcatagtcttctctgccccaggactgcagggcggcttcctccaaggcttccaaggctcaaaagaaatttggctccatccaagaaggctccagctcccctactggcccctggctcaggcccacacccctggccaggcccagagagtgtgtctcaggagaattcaatggctctagagagacacacagaaagtttggcatttggaaatttcaaggatgtatgtatgctcacgtatggagcaggttgtcctggtccctgggtgcagggaagtgggctgcagggaagtggattggaggggagcttgaggaatataaggagcgggggtggagactcaggctatggacaaggacagccccaaggttgggaagacctggccttagtcgtcctcagcctaggggcagggcagtgaagaaagctctccccgctcctgctgtaatgacccagagtagcctccccaggccggcatcttatgtgtgtcttccaccatcctcatggtggcacttttctaggcctgtctcccagcattgtgcaaggctcggaagagaaccaggaagtgaaactgggtgaaaacagaaagctcaatggatgggctaggttcccagatcattagggcagagtttgcacgtcctctggtcactggaatccacccagcccacgaatcatctccctcttgaaggattttatttctactgggttttggaacaaactcctgctgagaccccacagccagaaactgaaagcagcagctccccaaagcctggaaaatccctaagagaaggcctggggcaggaagtggagtgacaggggacaggtagagagaagggggcccaatggccagggagtgaaggaggtggcgttgctgagagcagtctgcacatgcttctgtctgagtgcaggaaggtgttccagggtcgaaattacacttctcgtacctggagacgctgtttgtgggagcactgggctcatgcctggcacacaataggtctgcaataaaccatggttaaatcctgagctccggagtcttcccaggccgatgcctctgcagtggcccgtcgcagaggtccagataaaaccagagggatccggggagaagagggtcccaggatacacgcccagctttgcccttagacaggtcacagtttcctcacgcccctgctcagacccccgcgggggcccaaatctcagttcctaccccagattgggagcagcctagtcgccgcacctgccacgtcgccctctgctggccgagggctgcccagcggccgcctcccatccccacacagggaccgcggggcctttcccggcagggtggggcagccttccccgcacccgggggccaacgtctgtgtgctcactgacttgctgttctgcagggactgtccccctaataccacacctagcgaagagcgttctgcttccgaaccggcagcttggaccctccctcctcaattccttgttctcacttcccttctcaaatggggtccccatcttgccaggagtcagtccccattcccagcatgggaagatccccttccctggggacctaccttgtcctgggatcagaaggcacttcacacacacatcccattctcacacccggaaattcggggc

SEQ ID NO: 2 - DNA, 401681 bp, Homo sapiens
tatttcaagattcttaaaacccccacctcaaactgcaggcttaattttaatgtgttcattttttacaaggtgtgtcaacgttttatcaatttctgaaaagtgtctatggccccgaaaagttgaaatccacgacattatatcatctctgcgagccctttccagctctcaaggtacaataattccacgaatctttgttcttcaaaccaggaggttttctggaaaccttcttaaacaaccaggacaggacccatgagggaaatcttggggatgctctgagcagcggacggggcttgggaagcgcacccctgtacccgggctgcctccggcccgcaccccgccgctccccaagtcggctccgcactccgcacacaggcggcggcgctggggccgctccaagtgcgttgagaagtgtaatccctccgctaagtacttggctctcagtctccaatcactagtgggagctggagagggcaagtgaaaaaaaaaaattccagaggcagccgaggagcgagagggaaaaaaaaaaaaaaaaaaaaaaaaagtcccgcggtggcggcggcggcggcggcggagcggccgcggcggccagaagttgacggcgcagccgggcgcggggcgcggagtcggcggggcctcgcgggacgccgggcagtgcggagaccgcggcgctgaggacgcgggagccgggagcgcagccgcgggtaaggcgcgcgcggcggggccccgtcccctgcgggtggccgagttcccgagcgcgcgggaggcggccgagccggcgagagccgggcagagcgaggggcggcgcgggacgggtagcggctgggtgcggagctgggcggcggtcgccctaggcaggacggagcgcgcgagggagagggcgagagcgagggcgggctgcgcggccgtggggcggtggcggcggcggggagggggtcaggcggtggccgcctcggctttgtgcgcgggcggctctgccgggaccccgaggcctcgtgcctgcgcaggcgaggagtcggggcagcggcggcggcgggcgggacacgtgcttcgggctgtagggacgccccaaggcagggagtcggacctgcgagcggagggatggggcgggagggcgagctgagggcagtcgcggaatccgggaaatgggagggagcccggcggggcgggggcccagggccagcccaggcgggacccgcaggcacccacctgccccggacgcctcccgagacccagccttgccgtgggggaaagtgcgcagcgggctggtcccggcgccttggactgggctccgtctctgcttcagttgcctgtctcttctcctctctctcctgcttctctctctctatgcctctctctcaagttctgggtctttcattctctcccttttcttcctttctcccttcctctccttattgctatcctttgcctctccccccggtctctctttccttccgtgcgtctgtctccctctccccaccgcctgctctggctctcccagtgtgtccctcctctgtcccttcatcctcttccctctgtcactttcgcacaatcttttggtctctctctctctctcaagaggctttcgctcccggtcttcctggctcccctgtctcttgctctctgcgcccatctctctgctcgtccctctttctgtccaggctccgtgtttccgcctgtgtttggcggtgttggagaagagcctctggaagttgtccgctgtggtgcgggtcttacttctttagagctgcacccctccagctgggtcctgctgtttgttctgaatggaaacgctgcagttcccttgagttattagaaactgctcttttcttagccacctttccagcaaggtgaggtcagtgactacgagcggccacaaaggtgccagtgaaagacaacggaggaagagagccgtttcactacctccaacagataaagaaaatgtgttaataccaaacttacctgcagcaaagcagagccacctgagaaaaggttcttgagttctgcaaagaaacataaaaggctccactggaaatgagagggttcagctaaaaagtgtttgcaaataatttgaaaaagcacttaatggaaatctcttgctgtgctaaattgatgccaacgaatctctgttttcttacatatatttttaggattccagtgacaactctcctaattattgttttgggcaagttatgggaaatgtcctgtgtcaactgggatgttagtatttaagaaaatattcagtctttgtactttatacccctttacactctagtgatcaagaagaattatttctagctgtaaagaaaatagtaaaggattcgtcagtaattttaaaacatgagacatgccggtgatcaataatgtttttggaaaactttcattataaggatgttttgaaggatgttacatcttagtgaaatatgtaagttattacacacttagatcattgtgcaatgcaaaaaagtttgtgttataagcagatcatagtagtgatgtctttttatgggaaacatagctgggaaattaattgctctgattttcactgttttctttagtcatgcataatgtacctttgtgtttagcaaaatatggcctagagctacaaaacttgatacagtgtgttatttgtccaatctgaattaccatttagaaaaccaccttttccttttagttacatgatataagttgatatgatctcattactcatgtgctaggggccgctgatgaattttaatggcactgatttgtgtttttaaatcaaaatgttagtttttggtgagttaaaatcttgatttatgtcatgttagtgaatcatcactatttataggggctttgccaccttgtctgccaggtgctgcccagcatttagtctaggctaggttgtctgaaattccctgttagattattgtccctgagtgacgtgctgccacggcctgcttatgtatgtttctctaaatgttccagtcgttaaataatatttattaaaaggaaattgacttaaatttttcctcataagctttgggaactgtgtgagatggcctgataaagtatttttattacagtaaatgctgatttattattatttgtttaaaagtataaggcagtttaaaatgtgcttatcttttgccacatatagcacctcctccagctctttctgagcactcaaatcgtatttatcatccaaatctaaagtcagttgtcacctactccaacctagcagagccttcctgattttcagaagccccctcaccactgcctctgcctctcaggcttctgagtgcccctctttcggtgtccacctctgtgctgtatggttacttgcttggcgcttccttgttggactgttatctcattgaggtgagatagtgtcccttgtttctttttctctgaatttcagatgcccagcacagtacctggtatgtgatagatactcaagaaatccttgtaggacgattggttcttttccaaattacctctaacttgtgatactgattctttgtggatgcagtagctcaaggaaaatacttaagaatagtgtaatagcagatcatagacttaggattgaaagagtcttagcatgtcatcacacacattaataatattaaagatgaagaggatgaggcccagagagtttgaaaaaccatgctcagaaatagaaagtgaggctaggatggctatggaattgagactttacttttttcacggtgccacaattcttttcactggactcatgtttgacttctttcactagaagtgggtaaatatgtctataattagaagctgtaagttttactctaaactctgaagatttcttttcatgtcatccaataaaagccgtgcatgaaatgtatcactttgcaataactgataatcatttctgatgcatgtaagcatggaggtaacaccgatctttaagaaccttgactcctaaattatttctatgtggtaggcattgttctgggtgataactgtgttgggcagaattactatttcttacctgcaaagaagatttaagctctctggacttacattttccgctgtataattctgtgtgtgtgtgtgtgtgtgtgtgtgtgtgtgtgtgtgtgtgtgtgttgaagggggttagggagaagaaaaaggaagtttggaccagattagtggttctttttgaagttttcttcagagactaccagtttaactcccagaacaactgcaaattcatctgttttacatatcagacttcctggtaagcttttgttttaaaaaaggctaacacagctttaaaaaaacttgaagaccactttacttgttgtcctccagtccctcttccagttcttgaatttcataatcaagatcatttttagcttttaaatatgggtattcagaggatggttggtgaaagtattaaagacagaaggaaaaactgattttgccttagagatactattaataatttcaggtttccatatgctgaattttatatgatggcagaaactgaagtagaattgttgagatatgtataggcaggccagaattcagggaaaggaggggttgcggctagaaaggtagattaaaaagtcgcttatatgacttaataacttaaattgagtgaaaataaaactttttaggcatagagtacagagagaagccaagatttaggagtagacaaaaaggacattttgttatgttatttctgggtatttttaaagcccatcacagtggtaagaagggataatgtataatttacatcaggcaataatttgttttcatgatgttcaggacatccacttacatgccaatattctaattacattcatttttacttaaatgtttgaatgcctactctgtgtgtggcactgttatacactgtggggacactgtgactataagagacacagatccttgctgtcattgaacttgtagagagtgaaaacacaatcagctatccacaaacacatgaataagattatttccaatagtgaaatttgccattaggaaaacaagacagggtgataagacagcatgtgactgggctattttatatgaggtggtcaaggaaggcctctgtaaggatattcttgagtaacaagaaagagccaaccccgtgaagatctgaaagaacttcctatcagaggacgcactagggttgtctctaaaagtagcaagctaggcactcactggccagggaggctggactcaggcaattagaggaagtgataggaatgaggtcagagaggtggcgaggttcgtagtataaaatatgtattttattcaaagtacattctgttgaacaccctggaggattttaaacagagaagtgaacaaatatgatttagcatgtctgtatatagtgtgagcaagagtacctgaataaggccatgtgggtggctatgaaaatgatgtagctgagagtttgttggcttggccaagggtggaaccttgagagattgatcagacattgttcttatcgtggaatagaagaatcatggagttgaatcatcagtttttgtttttttttttttgcggggctgggggctgggggtgtgccaggatctacattgcagcaattcactggttcaatagttacttttacttttgaatttcagacctcagcaccttcttagagttcccagataccacttctttacttcacctcaaatatctcatgggctgcaagcttcttccacgtgagagcctatagtatgtcctaggaagtgttgcagtaaggttcttagtgctagagatgattcctggactacactgagacgcttggttctttctgaaaagcagagtggtgagcatccttgaatgagcatctcttcattttcagtaaagtgtgtcagtataaaaaaagggaagtgaggcagaattcctctaattaggtctgagtgtcattttcctctaaccctcagctttggaaactttggatgcttcttgaaagaattcattataaagtctgcattgttagatcgggatgttacacatcattgtactcccgccccttgcaaagtgctaggacatagtaggcattcagtaaatagttgtgcagtgctgttggatgcactcctttagaggccagtagttttgattcagccaattttattttttcctgtctttcaacaaggatatggctgcatgtggcgtcagctttggaagatattaagtagcaagtttggaaatgaattttctggagattgtatttacttatcggctaaaggaaaaaaaagatacaatccagtatatctgtttataacgtttcttgcctggctgtcttgagataaacattttagtcatttttatagcagttagatagatatgaacttaaacaagtacagacacatctgtcactagttaatttgatgatttacgaatgtaaaatgtttccaaggaagtctgtaatgatgttgcctttgtctaaattaatctcttgatagaaatcagtgaattttatctaactagtacactttatgaccatctataaaatgtattaaattatcatcaattcttttttctgaaactagctacttttctgttttccaatacacatttagccatgatagtccacataatggaggattgtcctgaaatccttccctttattatggaacgtggtgcagtgctcagatgggcttgcagacagttgtggcatcatttcatttttatgtatctagtaattttcttccactgtttcttttgatcttcttcaatttgtcaagagtttcttctgtatctgaatattctgttttgccccattttgccaaaactgttcttattaccattggcttctatgtcagatatattttggttgccactccagaaccactctcagcccttctacctcatgctgtctgcagggaaaataacctggatgaacaactttgacttccaaaaaacgtaggtcactggggagccacagcagagagtagagggagggtggggagtgagggtatttatttccttggctccctttttgtgagatcagtttgggctgcctgtattcctgcactgaaagtcattgctcttcccaaggtattcttctctatataactctttctttccagattctggtaatctcgaataacttccctgcttttgctaacctggatttactgcaatacccttggggttcttttccactactgcccacaccctgttacattgtctgtttataaataaattccctcagcttatcaggagctgtgtcaattaaagtcctattttctgttgattcagcttctgaaagcctgctctttggagtcttcttggattgataagaacagtcgtactcccttacctgttttggacatctgctttccaccccaaattatatgcttctgtccatgaaacctaaattcttatataaatactgtcaatcagtttattggaacatctcgtgacttgatagtctgtatatcttctatccatgtgctttgtttccttcactctttcacaaatgcagtgcatctttatagattcactgtttaggaccaggcactgtactaggcattgtggatacaaaaaggtggatgtttgccactatttgggaggactgggaagggggcaggaaataaacaactatacataatagttacaatttaggtttgtgattaggtttatttaaaaaaataaacggtgcagcagtagagagtaacggggggactatcatttactgaagatcacaagcaactgaaaggcagggcatgtctaagtggctcttgttaacctgcatatattattcaggctcttaatatttgaatattaaaagcttttcccaatgatgacacaaacaataaatcttggcaggaaaattagaaatttcatataaaccttaagaaaataaagtgctttatactattacctaaaattaatagttttgtatatatgtatgtgtgtgtgtatcccttaagaattttcttatgcattactatgtatttttaaatgaaaataagatcatctgtatcattttgtgactttcgttttgaatttaatcatgcatcagtaaccccatctacatcaatgtatgcattctgaaacatatttaatgtgtaatctgatagttaaagatcacagagttcctcatctccctgctcgttatatttcgtagactattttaaaagtttgatagacatgaagaagaaaagtgggccaataatcttgccacacaaaaacctctagaaattaagaggcacttgagaatatatctgtttgaattgtgatgcctaataaaattaaatgacaacagagaggggacataatttaatcaaatctctcgtttaataattacattctagaatttttttgaggtctaacataactgttatttctactttgtcacatagtaaatgaaaaattggggtttgaggtaatatgagctattcgactaatccagataaggaatttgcatataacagtatgttttacctgattgcatttgttttcccagtgtgtttcatggaacagtggtttcgtggaatgttaggtgtgcagcccaagagggatcttatggatggcagcatagcctcctggttaactgtgggagtttgtctaggtttgaatcgtggctgtatcatttccgagttgtgagaccttgggcaagttcctgcaccttctgtgtttttgtttcatcatctgtaaaatgtcaatgacaataatagtatttacatcatagggatgtttgagaattagaattttgatttttaaagtgtttagaacagtgataggtacatagtaaacacaagcgtttgataagcaagtaaataatgaaatctggcaatttctgatgtttttaaattgcaaccctttctgagcctttgttgtattaacatgcattaatattgacagtccccaaaagtggtatttgatcatgggacttgtatttttccctgtgtatatcattggatttatgttcctcagaactatgggaaaaaaattgatacaaacaattggctaaacattttcatcagtttattatctcctgaaatgaagggatcattcttactgccaggagttgttcctacaattatctcacccatcatagaacaggaaaccggctcctgtcttttttttttttttttttaaactctttttctttttaaagataaaaatgaatgctttccttcactacccagaaaacgacttccagccctatacctgtgagtatatactgggcctctgcaggtcactgagcatgagatttacagtgtataatgttttctaaaaagttacttattgttatttttttaattgtaaagaatgttcattgaagtgaacttgggaaacatagggaactcaaacaaataaaatcagtcactctttttttaattttattattattattattttttaccacacagaagtagccaccattagcattttgggtctttttttctttactgaattgagagcataatatactgtggttttgtgtccttcctttctttttcacttgactttatttatataatattctcaatccaagacatgcagtgatttctggccttcagatgattggtaatctacatttcaaaagagcttccttccttaccaagttctgtggccagagacaatatgaaaataaaatggtgtatctagaatgagtttctcccttattttaagtattctcggaaattggaaccacctggtaagcagttggcaattctgtttaaaagacctggagtaggtgacctcaggttgcttcatttttatgagtcattccagtcttctagccagaagccagatggactcagaagaacccacgaccaggctgttttggaggcattacttactcatcctgagtgactgtgaatgaatttatataatgttgagatgaacgtggaaaaattatccagggaaacctaaattattccaaaataaatttagcttaactactatttaaattttaaattgtaaatcttttcccaccattgcatgtttgaggtaggattctaatgatgtactaatatgtaggaacaaacattgtctctaaatattttatcttgtcttataattttgagtaggaattaatattgaatttatatgacaggacataatgtaaacaaacatgctgtttgttaggagctttactttgtgtacttcatacatagtggatgctctagtggttagaataaatgtgtcagtaagttgttttcattcaaaagtccttattcaacagctttgaatctgcatctcaagattaaatcaatcactcctttaaatacttatcgttaacatctgtagcaaatgaaaatatttaaaccctctctgaagagaaaaaccatactacactgtttaattgaattaaattagcttttcatggtaacctaggagctatttctggaaccaatttggaaaatgatctttgtatgctgtggcatttatgtttgattatgtttttcttagtaattctcaatggaccagattcactccttgcttcagtcatcaaacttttgtgatttttgtaggcaaattatgtatttcctgctccataattatgcatatttatggatactatattcttcctcctcaaatatagaagttgtaaaaacttcttaattcgataacataataaaattatttaaattttatcatttcaccattctgtgaagtatgttaagactgagataaacagccatatataaatgaacttcttccaaaaaatgtttcatacgatttgacttttgacacttactaaaaaaaaaaggtatttataaaaatggcagataatccaaaacttcttataaatacattgtcttgaaatacagaatatttcaaggcacattaaagattttgtgtatattctaattgcagtctcttgatttacagagccataaagacattgaaaattgctttgagtaactcaattttcaagttttttagctgttaaagtttattctttgtgatcagcatgggatatattttatatgcttggtacaaggactgtaacttaatgtctttatttcttgaatacctcagacttaacagtttaaagagaaaacttaccttctccttaaaaaacaacaacaacaacaacaaaaaacctctgctttatttaccacaatccgactatcagaattgcagcgattttccccctaaatcctaacaatataggaatgttcatttgcattctcttttactcttcaccttctcatttttccctcccctttcatttttatcttcctcacttttgcacttaatcaaaaaacactattttatgtgactgctttttctctgagccaaaaaaattaaaatacactcatttctattgtgaatatcaacagtttctttactaactccatcattctctgattggaagttactaagttagagtaagtggaatgatgatttggtattttgtaggcatagtcttaatatattttagtaatattataaactaataagagcaagatacatttctattttgttatgaaatcatttgattatgtagtttcacttaaaatgttttgtgaaatgtttatattttgaacaaaggaatgtatttccatagcaaaaatagctaaaaatggcacagacatgtattatataaaatatattgcagatataacttagatctagactttttattcctttatataatctctttgatatacaaaaatctataattatacaggttttcatcaacacctttctagcttttatttgaaatttcatgtgtttatacttgtggtttgaaagctgttatgcattcttaaacatttttcttcaaacatacttgcatgcaccctgacttactctaattccttttctaaattccttttttggctcatctgtcctaaacctggaaggtgtaatgtagtttaacaataatattttacatctgtagtttgtgaataatgtctttcttacaaatggaattattaaatatttatgcaacatgaatgattttgatgccatattgtaaagtgtgtcaaagagatgatctagtcctgctctaaagagaaagatgtttaaattcacagttgaggccgggcgcggtggctcacgcctgtaatcctagcactttgggaggccgaggtgggtggatcacttgaggtcaggagttcgagaccagcctgaccaacatggtgaaaccctgtctctactaaaaatacagaattagccaggcgtggtggcacatgcctgtaatgccagctacctggagggctgaggcaggagaatcacttgaacccaggaggcggaggttgcagtgagccaagattgtgccattgcactccagcctgggcaacaagagtgaaacaccttctcaaaaaaaaaaaaaattgacagatgatacactaccaaaaaataattcagagcacaaatagactgaatgtgggaaagacaaaatgagaagttggtgggaacatttatgaaatgtgaagttgattcagtctgttattctgtctttaggtgatgccatcagggaatatcttagggaagactagaattggtgttttacgattttacttttaaaatttggtatcaagtcctcctgatatcttagttatcctcagtctaaaccacagtgctcagccattagtgaaactgctatatttggaaagtgattagattttagcttcttttcttcacttcatatttctcctcaaccaaagtgggtattctagctgaagtatggcagcatttccttagcactctgctttgtccatgctgtccatcatttatggggtatgtagagtcttcacatctataatgtttccttgcagccctcacctgtctagacagagaatgctgatctttgttgtttttctttatatgaccatcctgtcgttcacctgatcatttgtttttatttgtttgaattgtccttcgtttctgtgtttgttttttttttttttttttgcgaaagcaaggttatagattttttattcagcagcagatatttttggagagctagtctatgttagaccagaactgcatgtagtatttcaagtaaagatgaactctggtgttagatgagaaccatattttctattctctagtgatgtctgtgtcattgttagcttttttggctgcaggaacttattaatgcattatcccagaggtgacttctagctccttttcatgataactaaggcccttatcctgagaagtatagtaaccctatagttttccagtttgaatcttatttgatgtttttccccctagtaaatctcataaagttttggagatcttgtaggttagcccactgacttggcatttcacatgctggaaaaacttagtatcttttgcagacctggaaaatttaatctatatttcctcttttacatcatttgtaaaaatgttaaggctacttccagcaccttccctgtttatggttttcctgccaaaataattccttttttcactgtctttgtttctccagtaaaaattcatcgaatcctatgatgactcagttcattataataacttttgtggtagtaccttgtcaagggcttttaaaaaaaatccagtggattatattgactggtttctcccttgaggctctacacaagttttaacttaccgagacatgattagccctgcaaaaaaaaaaaaaaaaaaaaatgaaaagctagaccccctcccatgattatatgtgttaaattcttccgtgaccttatactttagcatacacagaccttagaaatttgtcaaattgctaagaagtaattataacacgaaattagggaaacgtgaggggctgtggataaaagaggtgacattgagacttaatgtagatggttgaaatgcaagtacatacaagtagcagcaggaagaaaaagcagatatacacacacatacaaaccccgagaggctacggtggttttcttttatatgttctaggcagtgcgtaggcctgtcacattgaagatagtagttactgtcaacccattttacagatgaaggattttaatgcacagtgaggttcagccagtggtagtgctggattctaatgtaggaccctcagcttctaaatccatgctcaaatgttggaggtctgttagagccagatattatactggttattgatgaaacaaagatgactgacaatcagccctggtggttcatgagcttgaaagacccctgaggcaaggagacatgtgtgacaactgtatgagatgataattgcatgtggaaggtgctgatagagcacagagaaaggttgataattaaagagccttcgagataaagacttgggttatcaatcatatcctgaggagagaggtggataaagagagacagtgtttaaaatatatggaaaaatatattttgaactttaaatgatgtaatctcccttattctaccctttcagttaatataacatttctatacagagagtactggcagtgtattttaagagcaaagttaccacatatttactaatattgacttttctgtttgatccgtctattgtctaactacagtgacattttagtgaatgtgaggaactagatagcccaggtaacttgctaacggtagagggatgcaagatgaagaaaaagactcatttgaaatcagttgataatgtctgaaatgatatttttaaacttaaaaattattttgaaggaagcactgtgacatacactcattgtatggcttgatggaggattgatgttaaattatagggaggaccagaaagtatgtgctaaaaaccacagtaaaaaccttcaagaagagtttcatcttgtaactcctgtgattaaattttctctaacattttagtgactctaggtcatcatctgtaatagagatattacctatattttatccttctgatttgattcatcagaatgcaccagagtggatggcaatgaaatgactgcagcagttttccaggctggtttgcagcctgcccatactgtcatcatctgccagccagccagtgggcttcatatcttcacacactttttccagaaaggacctcccctttgtcttcagcatgttgttgttaattttttggcatagcaaaatgcagaagggcctattggctgtggcagtggagttcagctgaggcagagttactgtaaaaaaagaaatctttagtttccaaaataaccagattaaacacatattttacataaagccaaggagttatgaggaaagcaaggtttaaaatgatgttaaaagtaaaatagcaaatttgctttttaaaatacttaatatttaaaatatttgatattacaggtactatctgtgtgttaaatgaacacatttttgctaatccagtagtcaccacttgattttccaaaggaatataaatattgcaaaaatgtaataagatatagtataatttgtaacaaatagaaagcttccttagtgactccttagattccaaaatataatttttccattatggaaaattatatttatgttgaacataaataatcagatgtttgcttcactaatgatccagcttattttaaaattatgttactggatttaacgatgtgacctctgttctgcgactttgtgtattctggaggcttgttatgcatgtcaagggtatttccttttatttgttttaattttacctgccatttaaatcattgaatgacccttcataattgtattatgaaaccatataataaggaaggactagttgattattttttactttaactttcttaatctcatataattcaaatcttctttgtgttctcatttctcaggtcaaataatttttcgtttgtaatttttcatcacagtaatggatgggatagagtaatatgtttcaatacatttattgttcttattttagcattttacatctgttctctttttcggaagaggaagtcaagtagtatgttgaaaagagcatacgattgagagacaggaaaggtcataatctagaatctggactgatcacttaaaatggaatattggccaactggaatgggaaaatcttatcttggttaataatagtagcatatatcattagttcctttagagcaaggtaccataactgtttcatctttgtatcttttttcttctggtgtttttggaatttcagagacaaaagagaatgtttgtgacttaagtcccttctaaacctttcagctctaagattttataattctttatatgagactgatacgtacaaatctaataattatacagagtaccatttacacaattttatgaataaactcattacttgggagttgcaaattatttaggttagtagaaaataattctgccacaataaatactgtattcttttcttagaattatttgctaagaacttttaaggcagttgttgaaacgattttgttcagaagtcagatgcagtttcatgtttgactgtattagattataatggctaattttaccagagataaaaaatacgcagaggttgccagcaacatgataaattagtttctgtgattacaaattttcactaatcaataagggataatttccctgtgtatctcattggttatctttgtttctttgactcccacaggaagtctcttttaaaaactctttgtaatatgaaaacaaaaactgaaccaggttgaagtgttatgcagttgaactggttccctctttgagaagttaatgcctgttgtattcttttcctaaaatattatgtagtcacactgttctgtgattgtttaaatgttaagatttcttgaaaatgtctgggaaacctgatacgtgcttattattttcaggttgattagtaatttccttttaagacactatattttcatacagcagtcaactctattatttttatatgtgtggggatttcagaggtattttctagataacccataccaaatttttaatctcatcatgcttctgtgcaacctcccctatgacacgtcagtatttgctaactggaaaattatatttatcaagctaactaaaatacaattgagaggacagataatcaaagcccctggtaattcatcctggagcatttgctcttagtataaaataggaagcctccactaaaaactacagagttgcttgttttacatgaattgtttgctcttaaggaaaaaatttgaggttcttaagaaatagaaaaaatgttcttgtccatagtgaatggattagggttcatgatgataaaatcttttaatcagaaatgagaaagaatgtgaaacagggtaaggcaaatcccctttatgtggactcttttcttagaagttggattaaaaatgaaaaaaaaattggataacctttatacccaacatgtataagtttatttatgaattttttcttcttgtgcttttctgtttctttggaacctgattcataattcactttgggaaaatattctgttaatctcattcctgttgactcagtccctccctttctctgcctgcactatcttccattcttatgtactctgcactgtatcaatttctaattactgatttcctgaattgttagtgtgcttccatcctcacagttttaactgtatgaaatgtcaaaacctgtcttctgtttctctctctatcttttacaatatggaatatagaacccaaaagatgcttggtcagtgttgattaactgactttcttttgtatggttctgatctttattttttcataatggcggaaattttcatttttaaagtacatgaggaacctcagaattttttaaatgtatgatttgttgcatttgttttaaaattgcattctgggacacgaaaaaggaaaaaaattctcttctgtattttgactaaaactagtgtagaaggttctatactgaactttcgaggcagatatctgagtttgtattccagctttcccactcagtgtcctcatctgtagaatgaagataataagaataccagttcagtaaggatcatgtgggaattacaagaaatacctggcacataatagttgttcaataaatgttcactcttgttctttatttttagatgtcttaaatggcattagcactcagcctgctttaccaggttactatatgagattctcctactaaaacagaatgaggaaaatgtacagttaattgatcaattttaaggagaaactgttttcttgtaaaatgtttctaagcccaaaaattatttgatcgcaaaatgttcgtattgaaatataagtgcctaatttcaaaaacgaagctctttagcaacaaagttgtttcctttttttccaatttaagatatttccatctctatttcaaatgcttgcttctaaaaaaaagtttagtgaaataagaggataaattttatgtttttattgatttgaatgacattttcccttggatgaattatgaaatgtctggttaactttagcattagtgaagcttgaatagattttaatattaagcaagtgtttagttgcttgacatgatcagtttacactattgcagagccttaattaaagttttattaaactgtgtaaaccgtgatccagtttggatttgaaagtagatagacatctgtttcaaatattattactacggttagaaattaatagcctttggccagatgcagtggctcacgcctgtaatcccagcacgctgggaggcggaggcgggcagatcgtgaggacaggagatcgagagcgtcctggctaacacggtgaaaccccgtctctactaaaagtataaaaaattagccgggtgtgatggtggtcgcctgtagtcccagctactcgggagactgaggcaggagaatggcatgaacctgggaggtggggcttgcggtgagctgagatggtgccactgcactctagcctgggcgacagagcaagacttgtctcaaaaaaagaaaaaaaaaaaaaagaaattaatagccttttttcttggaaagtcttaaggtttctcttttgaaatttttgttgttgtttcctcactatttcctctgtattaaaataattttgaggtataagttattttaaaaatcactctaataatgtttatattatctatacaaaagaaaagcaaggaaatatttgggagtatttgatcaaagaacagtaaaacaagactgttttctgtgaaaagcagattttatggtgatgcatcataagcatttgagacagctttcttgattggcgaccattgtgccttccttcctccctggcttttttctttatgaagtgaagattaattctaagttaattttggttctcattttgctcacttacataataaacacgaagtactcttattctcttttttctttcttcacctccgtggcattagaaaattcttcagcaaatgcaattatttagctacttgtatatgcgttttagttgtggtaaggaatcttgatatatttcaagcagaattatttaatgctgtctagagaacaacatcagaatttaaattttctattaaactgtgcttattaaaatggtagaaaacaaaacttgtaataccccagagtcagaatccatccagttactacattgctatgtcttggttctgcaagacttgattattacatgaatacgcgttcaatggaaacattataaaatacaggaaaaggccagaaaggaaaaagaaaatcacctgaaactgcaccacttagagcctgttatttgttaccattttgatatatttcctttatcctttctcctaaattatttttagatatgctaacaaaagtgtgaattaccatcttaattttgtattttatttttgcttgaatgatttatgaatttttccttatatcattacatatttttcaaaatactgttttaattaatgactggaaatactcatttgtatctattttccttatttttatcataacagtacagtgaacatctttatgaataggtcctttaatatttatatgaaagcttttatatgtatcaccagttgctttccagtcatcattctaatttacaattctaccagcagagtatctatttaatttctctcatattttaagagaagtgtgttaatatttcagttatctccatgaaatctccataagcctcagaaaaagaaaacaaaatttgaaggaccccaaaatgaaagtagttttgaataggtgagaacctgcttcatgttatttttatttaaaaaaaggaaaagaaagataaacaggagtttttactgcttacaaatactggccattacctttgatatataattttattacattataaaagaaatgcaaattaaccctaatcatttttctgttattatggttctgagttttacttaataactataggaatgatttaaaggaaaaaagctattaattcatacagaaatccttgtagtcaatggcagaagtgaccttaaaaaaatctaattgaaacccttttttgatatgcaaaatgagatttaagatggttctgtgttttgtgaaaaggcccttatattgtagcagagattgggccagaaaacaggttgtctgattcctgctcttttcttacttttaaaaaatatagaagttttggccgggcgtggtgtctcacgtctgtaatcccagcactttgggaggctgaggtggatggatcacctgaggtcaggagttcaaaaccagcctggccaacatgatgaaaccctgtctctactaaaaatacaaaaattagctgggcgtggtggcaggcacctgtaatcccagctactggagaggctgagacaggagaatcacttgaacctgggaggcggaggttgcagtgagttgagattgcggcattgcactccagcctgggcgacaagagcaaaactccatctcaaaaaaaaaaagtgtatatatatgtatatatgtttttaaatgaaataattcttctcttaaaggatatataataataataaatagagtaaatgcttgtacatccaatagtcagcttgtgaaacaaagtaataccaataacttgtaagcctcttatgcattcctcagttgcatttggcatctttccttcccatctgagtaaacactaacctgagttttatgtttattattcactggtttttaaaaaataattttatcatatatgtgtgtatacctaaccagcatatttttgagctttataaaaatacgactctttaggtagtgtcctgtgttttacttttcccttcaaatttatgtttttgaaattcatccattttgcttgaagatgtatttcactttctttcattgctttgtgatacactgttgggggaatagatcacaatttatttttccatttacttcctgatagggtatttctatatatttgctattataaagaatgatgttatgggcttcttgtattaactcttggtgcaccagtaacaagatgctcttttttaaatgtataagacggtgctatattgttttccaaagtagtccacattcccaccagcagcatgtggataattcctatttgtacctcatcctagtccatacttaatattttcagatttattaaatacttgctaatatccaggtttaaaatttcttagtggggtcataactgatgttttcatgattgttaatgatgatgagccatattttcatgcattttgtccatttgttcttttcctctgccaactttgtgaagtgcctgttcatatcttttgctgatttcgtattagattggttgttcttttcttagtgacttttagggatttttttttgtttattatgaatgctaatttttagttaaatgcattgcagacatctttttatgacttagggtttctctattttacctttttatgtagctttagtgacagaagttctcaattttaatgtagtcaaatttttcattcttttaatttacggtttataatttttgtgccttgtttaaatcatctttgtccaccccaacatcataatgatattctcttaatagtcttaatctatatgtaattgaatttttttcttgaggtgtgagttaaggtccaattctatttttttccatataaatatgtgtaacctatttatgtataacctattgtccaaatgcaatttattgaatgtatctatcctttcattctagagtaattgtccattaatgtcagccctgttgtatatcaaatttctctacacacatatgagggcctgtttctgagcttttaaattttgctccataggtctggtttttattcttgtggtaatattacattgccttaactagaatataatatagaatagaaatagtgataatgatcatatttttctttttcttgtagggtctaaatctaacatcactattaagaatgataactgatctagattttatatatacatttatcatgttgaggttgttcttggacgggtgcggtggctcatgcctgtaatcccagcactttgggaggcaaaggccagtggatcacctgagataaggagttcgagattagcctggccaacatggtgaaaccctgtctttactaaaaatacaagaaattagcccggtgtggtggcacgtgcctgtagtccgagctactcaggaggctgaggcaagagaattgcttgaatctgggaggtggaggttgcagtgagccgagatcgtgccacctcactcctgcctgggtgacagagtgagactccatcttaaaaaacattagaaaaaaaaaaggatgttctcttatattcctaatatactgttttattttatattcatagtaaatggatattaagctgtatcaaattattctgtatctttgagatcgtaaaagttcccccccttcccttaatctctatgttacatttgttgggttacatttgttgatttcataatgttaaattgctcttattttctaggatagactcaatttgatcatgacatgtaattaataatctttttaattgcctgctagatttggtttgctaatgtctcatttaggattcttgcatgtgttcattaatgagattagctttttttcatgtcactttaatattactcccaaccgcactagccctcagtagccactaatctagtttctgtctctataaacttgtctattttagacattccgtaaaatggaatgatacaatatgagatctctggtgactggctttcttcacttagcatattattttcgaggttcatccatattgtagcatgtgtcactacgtaattcattttcattgccagataatatcccattgcatagatagactatatatttatacattcattagttgatggacatttgtgttgtttatactttttggttaatattaataatattgctataaacatgtatgcccaaggttttatgtggacatatatttcatttttcctgggtatatacctaggagtggagttggtgggtcatatgataactctgtgtttaacattttgaggaacatccaggttgttttctaaagtgcctatagcagtatacatcctagtatatgaggtgtcagtttctctacatcctcatcaacatgtattattgtcttttttttttttttttttttttttgagacagagtctcgctctgtcgcccaggctggagtgcagtggtgccatctcagctcactgcaagctccgcctcccttgttcacgccattctcctgcctcagcctcctgagtagctgggactataggtgcccaccaccatgtccggctaattttttgtatttttagtagagatggggtttcaccgtgttagccaggatggtctcgatctcctgaccttgtgatccacccacctcggcctcccaaagttctgggattacaggtgtgagtcaccgcagccggcctattatctgtctttttgataatagctattgtagtcagaatgaagtactgtgtcattgtggcattgatttgcatctttctgatggctaatgatatcaagcatgttttcatgtgcttattggccatttgtatgtcttatttggagaaatgtctagtcagattcttagtccatttcaagaaattgagttatttatctttttgttatggagttgtaagtgttctttaggttttctaaatatatgtctcataacagatatatgatttgcaaatatttcctctcattcttaagattgtcttttcactttccagatggtgtccatggaaacaaaaatattttcaacttttataatgtccgatttatctattttttcttttgtttttatgctttggtatcatattaaccattgcctaatctaagataataattttttatttttatttttttgagacgaagtcttgctctgtcacccaggccagagtgcagtggcgccatcttggctcactgcaacctccacctcccagattcaagcgattcccctgcctcagcctcccgagtagctgggattacaggtgcccaccacgcacctggctaatttttgtatttttagtagagatggggtttcaccatcttggccaggctgatctcaaactcctggcctcgtgatccacccacctcagcctcccaaagtgctggggttataggcgtgagccactctgcccagccaataacaaatatttatacctatattttcaccttcattttcgaaagatagttttagtggacataagactcatggttgatggtttttttcttttagcactttgaacattattttcctggtgcctttgagcctccatttttttctgtgttaccggttaacctcattgcagtttccttgtatgcaaagagtcatatttatttatatgctctcaaaatactctctttttgtcttgtagtatttttgctattatgcaacccagtgtggatctctttgtgtttattctgcttggaatttgtggagcttcctggattattgtttttaattaatgtttcattaaactgggagttttcagctcttcttaaaatgaatttgttttgcttcttttttttttctcctctttttggtagcccccttacatatatatgtgcttaatggtgtcctacatttctctgaggttctgcttatttttcttcgtttctaaaaacctgttcttcaggttgtactatctccattgacctatcttgtttgtttattccttcttctgtcagttgaaagatacagatacttccttctactcagttttgcatatcagttattatacttttaattttttaatgttaatttttttttttttgtcacccaggctggagtgcagtggtgcaatcttggctcactgcagcctcaacctcccaggctcaagtgatcatcccacctcagcctccctagtagctggaccataggtgcatgtgaccatacctggctaatttttgtatttgtttgtagagctgaggttttgccatgttgcccaggctggtcttgaactcctgagctcaagtgatctaatcaccttggcctcccaaagtgctgggattacaggtgtgaactgtcacacctggccagttactatactttttatctccagaattcaatttgaaaaatttttatctctttattgatattttccatttgatgagacattatcatcacatcatcttttatttctttaagcatggtttcctttatttctttgagcatatttatagtggctactttgaaagctttgtttgtcagatctaacatctgggctctctcacaggtagtttctggtgcctgctttaattccctgtatattggtctcatttccctgtttctttgtatgtcttgtaattttctgttgagaactggacattttaggcaatatattgtaacactggaatctgcttccctccactcctaatgcttgtttttgttatttgcttgtttgtttagtgacctggctggactattttactgctaggggaagtctttgatattacctctctaatggtgggtgcaaccttgggcatgtccacagttacctttggatgaaagggtttctgtctctgacggtctctttcccttatatctttgtcaagctgctcacctctgttgttatcacgccagctattaggatccacgaattgctggccgattgttctattgttgtgacagtgctccagtcataacttgcttcatagtctgatctaattagtttcaggccactctgctggggtagtttttgaggccggtgtttgaggtttgttctgattccaggaggactcttaactcttttcctagttctctatggtaaactatctggcttataatatagtttatgtctctcatggatctactagcttcctcttaattgcttaccaccaaaatctttattgtttctagagtacccttaggcttgaacttcccttatactctgctgtttcagttaaagttagtccctttaagtgagaattttgaagctctctgttcttatgaagtgtctcttcctctgggcaaaatctctgagccattgatctggagccagtgatctggagggtgtagtagcctgtttctcttggagtgacaccatgatttttctagcaggatgctgggctgagatggtagcctctggtctccttatcttacctcttctggtatggaaactttgcactatgaatgagctaaggtgaaggcctttagggcaccagtattctctgcctgctgttgctgggtgtagagcgtttaccctgtgagtagggactggtggaggaaggaagctctgaccacttggccatgctcaccaggaatgtagccgttgtagtttagagctggggggatgagaagtgctggtggcccctccctcctggtgagagagtttatcctttgacttggagccccattttcttggccatatccacagggagtggagtttctctcatatcgagctggaggtagggaaggaggggatatgttatgctcagagaccatagactctcaaccttcttaccaagatttagtatgcttccttgaattaatgtttcttgatctgcttcttgctcttaagacaatttccagagactttaagtgttttcttagttttttaatttaaaattttacttgtatggttgttttggctggagagggtaggtctgtggagctcctcatactgccattctagaagtggattattgtgagattagcttttaattttatttcctattgtcaataagagacttaggaatccaggtatagtaacctaatggaatgaggttgggagtgtaagtaatttttctgttttttggatgaacttgtataatattaggttttgttccttgaaagtttgatagaactttgtaaaattatctgaacttacaagattactttttaaactacttagatttcttatttgttatgagttttcaggtctcctgtttctatttgaatagtttttcaaaattatatttacattttctcttttgtgtaaactttttaaaattttttcttttttttgtttggtagagatgaggtcttgctatgtggcacagactagtcttatactcctggcctcaagtgatcttcctgccttggcctctcaaagtgctgggattacaggtgtgagccactgcacccagcctaaatgttaacatacattggcataaaatttatactgggcccagttgatttctctgcccagattcatttggctcccttctcaaacctcagttgcttgtcctacttcctttttagagtggccacagtagcagctcatgtcattcttgtggttgtaaagccctggccattttcattgtaacctcatctttgataccatacaggtcatcttagcctcctctttggtacagccttcctgtgacctttagggtaagagtcataacaaattcaaggcatgatgtgccgcatctggacctacaaagcctcaagcttcaccagcagctgcttggaggggtcaggcctcaaaatattaatacaagaaagttatgctatggagcaaacactgacccatgagtggtgggagatagaaaggagctgagacaaatggtctccatttagcctctgtggagatatgcctgtgacttgtagcttaccgcgatttcttgcaaggccatagccagtttgttaatgtaccaccttatagttgttttccttcctgtcctgcctcatttccccttttcccttactcttccttccctgtgctcaccaaagaattattgacatgtaaacttggcctcaaactctgatttctaaagaattcaggcaaaactaattataatcagtggtgctcctagcacatatgtacttaggatggggttaaattagattgcttccctctttgaaggctgtaaggactgctagtcgtcagggagctgacaatgaccttggcatgcagtggcatcacaatgaccacagctttcaatgatgataattttgcataagatatgggtgaaaagaaagacatgtagctgttgcatttgatgggcatgggggtggggcatggataactgtaaggattttggtgttttggcagcattaaagactttagaaaagaaaaagatgggccccaggtagctcacagccagcttaaggcacactgtgaaagccagagaactgctataatttctttaagggagatctcattccacattcacagagaatattatgttgaaaattaaccccaagatataagagtggcaaggctgcagtataagactgaaggtacagttttgacagatcacctgtcaaagccagggctttgatagagaaatagtaggatgctgacacctggaaatgagacctctgggtatatgtgctgaacaatattgaatccttaattttttccaagtcattttagccaggagaaaatagccctactttctctggattctatatagtgacctttcctgaagttagttctatgtatgattatgcttattctcctcaagatctggccacatcatcactcactacttctaggctgaattgcttaagtagcatcttagcataggctaagtgggtaattatgatccctgctctgtgaagaatatagtatatgttaaaataatatgccataataattcgggtattatggaaacatttgtagaatagatcttgaggacatgggaagatgagagggcatggaatataaggttctgctggatgaagatgtattatcatgcgggtacttacccctgtgtgatttggaattacatgttctagcaagggcatatggaaatgtcagagcttctttggcatgttattgagaaaggggtcaaaattcatagtgggcagaaatattagaaatatactttgtaagacttgagaattcaccacctttttttttttttttgaagagagtctcattctgtcacccaagctagagtgtggtggcatgaccttggcttactgcagcttcaaacccttgggctcaagtgacctttccacctcccaaatagctaggattatgggcatgtgccaccacacttagctaatttttatttatttatttatttatttttttgagacggagtctcgctctgttgcccaggctggaatgcagtggtgcgatctcagctcactgcaagctccgcctcccggattcacaccattctcctgcctcagcctccaaagtagctgggactacaggcacccaccaccatgcctggttaattttttgtatttttttttttagtagagatggggcttcaccgtgttagccaggatagtcttgatctcctgacctcgtgatccacccgcctttgcctcccaaagtgctgggattacaggcgtgagccatcgtgcccagcccacttagctaatttttaattttttttgtagaggtagggttatgctgtgttgcctaggctggttttgaactcctggcctcaagtgatcctcctgcctcagtgtgcctaagtgctgggattacaggtgtgagccactgcatctggccgtaaacgtaaccacttttattccccaggacattttttgttttaccagggcgacaaggaatgaattattgaccctatggctgaatgcccaacctgggatcaataccaagcccttgatatgtaggagaccagttgccgcctagtctgatggcagatgggtcatcttggaggtcttggaccttaaaagacgtactaaagcatccttaccagaattgacatatactccacgtagaggttttttattcccctgcaggcagagatcctgccagtatcaccatgtgaatgttcagtccattgactcagggcctaatatgttgatggggttcaggacaagctactgaaacatggcaccttggcttattaaatattttaagctaaaggaatttaagaaatggcatctccggttctcccctgaagcaggttataaggccctcatgtgacaggtaccctccctgtatccagaggaaagaagtattcttatctctgaagattggaaggacagtgagaggagtcgaagtgaacaggccttgctaagtttcgccagtttattacacttagctcagcctctttgtcctttcatatatttccatagctcttcatcaaatgaaacacaaaaacgctcaggtttgaccacaaaaatgaaggtttaaccacgtctttggttcttcatttgctttaagaatggctcccatgttatgtaaaacttatattaaataaatctgtatgcttttcttttgataatcttttgttacaggggctctaggcgagaacttagatgggtagaaagaaaagatattttttctttcttgcaatatcaatgtggtaacccacacagtatttcctttgaccaagggacctattttatactggaactcatgatcacaagattcactggagttagtatgtttctaatacccagaagcatttggataggaggtttgagtggcctgtggaatggaataaatattcagtaaaagcagcaacttgtggacaactccgtggggttcaatgtggtatatatggggctgagttggtaatagaacaagagaatctgaaaatcaaagggtggaagttggatttaccttctgccatcagttacagtgacccacttgtagattttgtgcttcttgtccctgcagtcttaagctctcccaggtaagaggtcctgattcatggaggatggggtgaggaacactttagccacaggacacagtaagaattctcttgactggaagctgcgaccacaatatattcactttgagcttatgacagtgcaccagcaggcataaagaagcattggtagaccaatgaactgtgaacaccaggaggagttaaggttattgctacatactggggacagggaggagtatctctggcccaggggattccctgggctgtcttctggtcttttgctgcctagtggcaactgtgaatggacattttgaacagccatagcctgacaaaagcaaggaaactataggcccaagccttttgggaataaaagtctgggtcaccccataaggcaaaaaccagaccacccagagcactggctgtgggtgaagggaatctgacgtaggaggtgcaggagggagatgacaaacacagatttacaggaccagctgcaaaaggcacaaatcataccttggtttactaaatctctttctaggcaagtgcaagtgcaattcttcacaaccatgaagaactggacttgtacctcttctcttggagaagagatgagggcatcttttagatctgcctttcataagagagtgcaaattaatctgagcgacagaaggagaggattgcaccagatccagtttatctgcctctcaaatcttctgcatcacgcctgcccaagcctgagcaacttgctcttcttcctcttcggcatggccccaggatattccctggcataactgtgattgtctgcttgcttctgccatcacctcaccttctatcacatctatcccagcctcccctgaggtgatgaaggcctggcctttgcccatttgctatcacttgcactgggacaggagtttcagtagctccagtgcccaggtacccctggatggattggctgtgtcttagaagctttgcagagtggcaggaagcacaacctggaagtaagaggaggttaacacatgcatattaaagtccaattttcgttgcacatcacaatccgattgagaaatggttcagtgttcttgcatagaacaagagaagatgacacttcagctcatgaggcacccacttaccgagttttttcacctttacaatttgctttaaacgctgaacgactgtggaatggtcaacgttgagtgctttgtcaacttctagtatagttttaagaggatcagcttcaatgattgctctcagttggtcattgtcaacttccagtggtttggccactatgctcctcatcttcaaggttctcatctcctttgaaaagtgtcttgaaccaccactgcactgtacgttcattagcagttgctgggctaaaggcgttgttgatgttgtgagttgtctccactgctttatgacccatttgaacttgaataaaaaaatcacttgaatttactttttgtctaacatcatttccatagtctaaaataaacataaaataaataagtaataagtcattagcaaaaaaccataaagcaagaaatgcccattaaactgatgtataatataaccacatttatctgagagtgtatgccagtatcaagcagcaaattccaacaatgcaaaaaccacaatttacttttgcactcacctaatatatatatcttagtacagtaaatcatatatatagcttataaaaaatatacatttgaccctggaacaacatgagtttaaactggatgggttcactgataggtggattttctgcctctgtcacccctgagacagcaaatagaggatttgctcctctacctcctcctcctcagcctactcaacatgaagacgatgaggatgaagaccttgatgatgatccacttccactcaatgagtagtaaatatattttctcttccttacgattttcttaataacattttcttttctctagcttactttgttttaagaacacggtatgtaatacatacaccatataaagtatgtgtcagttgactgtattggtaaggtttctagtcagcagtaggcttttagttgttaagatttgagagattcagaagttatacatggactttcagctgcacagagattggtgcctctaacccccgcattgttatagagtcagttgtacatatattaaggttaataatttttgactgaaggaaaggtataataaaatatttggtataagctaaagttaaccagtgtgagttattactgttgttgttgtaacatggtggactaacatgatcagattatcagttttacaaaaataagtactgagtttgggggataccttgctgggtggggtgttggggttctggaggcaggaaggccagttaggaggtctgtgatttttcagtgctgaggatccattcttgctgccttctcccttttccccggcgttctcagccccgcctagatctttctaactttctgcagaggagttcataaagtagatgtgttgcaatctaggggacattgatggctttccattgtttgcatttaagctctacaatttcagtttgtttaatgcaaagttcttgctatatcttcctacagttaattgagaaagaatttctcttttatcttggtaacttaaaagaaaaactttattttttagagcagttttaggtttatttttggtaacttttaaatgaaaagacaacacacattttagttttttacctcttgttatttttatcacgatgagtggctcctttgtagtttgcatgacatctgttttatagttctaagtagtgtttcttaattggtattcttacgttgcctttggtagcttttttgatagttttattgtgaagttgtcaagaataaatttgaaattaaccttaccaagtaggtctttttgtttgtttgtttttctgagatggagtcttgctctgttacctaggctagagtgcagtggcgtgatctcagctcactgcaacctccgcctcctgggtccaacaagcgattctcctgccttagtctcccaagttgctgggattacaggcgtaccaccacgcccacctaatttttgtatttttagtaaagatggggtttcaccatgttggccaggctggtctcgaactcctgatctcaagtgatccacctgccttggcctcccaaagtgctgggattacaggtgtgagccaacccgtccagccaccaagtaggtcttttattattcaatatcatcatgatgattctatttgggatagagctaggattgttatttccatggagcctggagatggtcactgttccatgttcttttaatagtgttttaactttctagaaatagctgaaaagtatttatagaatatttaaatacataaggaaaagttatgtctcagttatgctcttgggaaattttgaaatattttaatgacatttaaaaatattctaatcacttgcaaagatacttatctaaattaatttttatttacttgactattttttaaaatttacttaaaatatggattgatactcaggcaaataagtagaaataaaatggatttaattctataccctcttttcttagtggccgctggtttaatattgtaaaatatgtttatcccaaagtaaatgtgttaggaaaaactaaccaaaatcgaccagaaagaaatctcttgtttaaatagataaattcttgaacatttaacctttccctctttcttccttacgctccctctcctgccacccccaccccaccctaattcctcccactcccacgtctctactccctattcattttctgaaatgaatagagcattctttatttcctaaccgcatctttgctggttgctttaaaaacttctttcttcctttgatcagtggcctaagtttttcattacttggcactggttgatttataatatattttgaaaagatgtataaatgcttaagacactaagctaagtagttcctcatttatctggcatatttgaataatgcattattcaaattaagagaaatttttcagataactaagttttacctttctgacgatgaaaacattttaattatcactgatgagcaactttaaaaatgcatgctttcttgccttctaaaaatagattatattgaacataaattaatctcttgattattctcattattaacatactttaaaaaactcttctttcttaaggattactgattttaatggggctgtttgtcccttctctaagtgttctcagggctgatttcttcaatctgtttttggcctctgatttttgtcagttattagatggctgcagtatttttgtctctagtgggctcatgccaagtccccttctcttctccttctattccctttctcatcactctttttttccagattacaacataacacacacacacatacacacacgcacactttttgctttttttagtactttgattgcttgaaaaatgagaattatgtccaaaatgccacaaaatagggctttaatccgaagtcaagagactactttgagtaaaatatctaaaactaattgtatttattgtctggtatccttgttactggtctgtggtcttgttttatttgctttacttgacgatgctagagagatgactttttaaattgtgactttatgttagttgagatgctactgtaaaattataacatttagatagttacataagaattttgaagcagaattaattatggagaaaatacaactgtctcctttacatagtgttcaccaaacacccttagatatacaaaagttacctgaaaaatttccaaagcaacataaagaaattctgcttttactttttagaaaattactgtctcaaagtaacggcagtgtttagatagtcagaaaagaggaaaaatatggtataatgattttccaatagaaggatctatagaaaactttttttttctttttttttattattattatactttaagttttagggtacatgtgcacattgtgcaggttagttacatatgtatacatgtgccatgctggtgcgctgcacccactatctcgtcatttagcattaggtatatctcccaatgctatccctccccccttcccccaccccacaacagtcctcagagtgtgatattccccttcctgtgtccatgtgatctcattgttcaattcccacctatgagtgagaatatgcggtgtttgtttttttgttcttgtgatagtttactgagaatgatgatttccagtttcatccatgtccctacaaaggacatgaactcatcattttttatggctgcatagtattccatggtgtatatgtgccacattttcttaatccagtctatcattgttggacatttgggttggttccaagtctttgctatcgtgaataatgccgcaataaacatacgggtgcatgtgtctttatagcagcatgatttatagtcctttgggtatatacccagtaatgggatggctgggtcaaatggtatttccagttctagatccctgaggaatcgccacactgacttccacaatggttgaactagtttacagtcccaccaacagtgtcaaagtgttcctatttctccacatcctctccagcacctgttgtttcctgactttttaatgattgccattctaactggtgtgagatggtatctcattgtggttttgatttgcatttctctgatggccagtgatggtgagcattttttcatgtgttttttggctgcataaatgtcttcttttgagaagtgtctgttcatgtcctttgcccactttttgatgggattgtttgtttttttcttgtaaatttgtttgagttcattgtagattctggatattagccctttgtcagatgagtaggttgcgaaaattttctcccattttgtaggttgcctgttcactctgatggtagtttcttttgctgtacagaagctctttagtttaattagatcccatttgtcaattttggcttttgttgccattgcttttggtgttttagacatgaagtccttgcccatgtctatgtcctgaatggtaatgcctaggttttcttctagggtttttatggttttaggtctaaggtttaagtctttaatccatcttgaattgatttttgtataaggtgtaaggaagggatccagtttcagctttctacatatggctagccagttttcccagcaccatttattaaatagggaatcctttccccattgcttgtttttctcaggtttgtcaaagatcagatagctgcagatatgtggcgttatttctgagggctctgttctgttccattgatctatatctctgttttggtaccagtaccatgctgttttggtaactgtagccttgtagtatagtttgaagtcaggtagtgtgatgcctccagctttgttcttttggcttaggattgacttggcgatgcgggctcttttttggttccatatgaacttgaaagtagttttttccaattctgtgaagaaagtcattggtagcttgatggggatggcattgaatctgtaaattaccttgggcagtatggccactttcacgatattgattcttcctacccatgagcatggaatgttcttccatttctttgtatcgtcttttatttccttgagcagtggtttgtagttctccttgaagaggtccttcacatcccttgtaaattggattcctaggtattttattgtctttgaagcaattgtgaatgggagttcactcatgatttggctctctgtttgtctgttgttggtgtataagaatgcttgtgatttttgtacattgattttgtatcctgagactttgctgaagttgcttatcagcttaaggagattttgggctgagacaatggggttttctagatatacaatcatgtcatctgcaaagagggacaatttgacttcctcttttcctaattgaataccctttatttccttctcctgcctaattgccctggccagaacttccaacactatgttgaataggagtggtgagagagggcatccctgtcttgtgccagttttcaaagggaatgcttccagtttttgcccattgagtatgatattggctgtgggtttgtcatagatagctcttattattttgaaatatgtcccatcaatacctaatttattgagagtttttagcatgaagggttgttgaattttgtcaaaggctttttctgcatctattgagataatcatgtggtttttgtctttggctctgtttatatgctggattacatttattgatttgcgtatattgaaccagccttgcatcccagggatgaagcccacttgatcatggtggataagctttttgatgtgctgctgaattcagaaaacttcttattgaaacatttttttttttcaaaactagtttggctctggattattattattttttgagatggagtctcactctgttgctcaggttggagtgcagtggcgtgatctcagctcactgcaacctctgccttcgggttcaagcgattctcctgcctcagcctcctgagtggctgggattataggtgtgtaccaccacatctggctaatttttgtatttttagtagagacggggtttcaccatattggccaggctggtctggaactcctaccctcaagtgatccgcccaccttggcctcccaaagtgctgggattacaggtgtgagccacctgtccaccctggattaatgtttaaaagaagtaaatacaataccactcctgagtacactaaaatggagatttagatgacaacaaacaagcagcctcggactttgctgtttgaattctatatttggtagattcatactgcatttgtaaaagtggtgatatctggcatagagacggtcagcaaattcagtcaggccaactttacgtaagctttttttaacttttttttttttgagatggagtctccgtctgtctcccagactggagtgcaatgatgcaatctcggcttactgcaacctctacctcctgggttcaagcgattctactgcctcagcctcctgagtagctgggattacaggtatgccgcaccatgcccagctactttttgtattttcactagagatggggtttcaccatgttggccaggctggcctcggactcctgacctcaagtgatctgtccgcctcagcctcccaaaatgctgggattacaagtgtaagtcaccatgcccggcctaggtttacataacctttaaaaaatactatctgattctgcagatgtgtcatgtacttagtagtgtttaggtgaaatcatgtttgtgggtttagctccatctatcaaatggtagactttgtaaaatcacagagttgtgacagatgtttgtggcatcaagatgtttctgaatagcatggacagttagtgttaatattgaacaaaatctattctaagcctttctcagatcatctacaaagaggaaattatttaaacctttgaaaagaggttcttaattttttttttttaagtttgaagttgagtcaggatcaggactgaatgaatggaataagagaaattatttaagtatttcttgtatattttttaacctcattaaagacagaaatttccccatgaggtgttttgtgtgtgtgtgtatgtgtgtgctttcagttcttgtatgttgcctatgtgtctttgctgagcttcctcaagtttctagtgactgtatatttccaaagattattttccaatgtcattcaaaattgttgtgggtgttaaggaggcaacaacaaaataagctcgaagataatttttgtgtatttttgatttatctttgatttgtaattatagtcaggtataatagagtttacttgtttatttaaatattaaatgtagtatggaagggtatagtttggcctctgttggagtactcagaattcaagagatacatatgtgtattagtctgttttcatgctgctgataaagacatacataagactgggaagaaaaagaggtttaattggacttacagttccacatggctggggaggcctcagaatcatgtagagggtgaagggcactttttacatggcagaagcaagaccgaattaggacgaagcaaaaggggaaacccctgataaacccatcaaatctcgtgagacttattcactattatgagaatagcaggggaaagactggcccccatgattcaattacctctccctgggtccttcccacaatatgggggaattctgggagatagaattcaatttgagatttgggtggggacagagccaaaccatatcaatgtgtaagagagaaatataacttagttcaaataattatttctttatttccagaatagggatttatcttaaatgtgctaagggaattttaaaagaaatatatatattgctgaagtgtctattctgtaaactgaggtaatgtgattgcgaaggtgttgtagaaaaaacgatttaacgaaatattaaatatgactttgaaaagtgctgggaatttttgaggcaaatattgtcaacaactttgggtctggtgattaagagttcagtatattcacattgtcctgggttggactatgtagtgttccccagatttacctaaataacaaggctcccctgatgggtggaatttgcgtgtgtgtttatgattgtgaaaacacatttcggacctttgctgaagaaattcttgtggagtagggttggggtggagcccatgaatttgtatttttagcaagtactctagatgattcttattattaaacacatttgggaaacactctcatgggctaaagaattagattgtcaaatagcttcagaccccaaaattattgactgcagctgtcagacaatactcagactatttgatgaggactgtttgccatagtagttagtggatgagtttataacatggatcctgggaaatagcttacggcatataatgcactgtttcttcatcgtaatagtatttatttaatatttaagatctaccattgtgtttaccacttacagcatttgtgattattattttgtttgcctcatctaattttaatcttatttatagatgaagttgtgactcaactaggatcaaatttaatgagtggtagaggtaagatttaaacccagagagtctgttgtcagaataagcattcttaaccaaaatattgatatattatgtgcttggattctcacttcctttgataagcgtttgcagtcctaaggtcctcaactccagcatctctgtaatcggaaagcaattctggtaaaagttggtgctgactgttgcaatttgtatgaagggactgctgctaccactcccagtattaaatgtgtcccacagctctcaaagaattcatcagcatgaagagaaacataaagtagcctgatgtggtgctaatgtatcccttactctcagttacagttctccagttaactgagtttcacttaagaccaccacatcatcaccacccaaagaaatctgatcacatccagcctcttaacaaccatttccttgctcccacggacgtttactcagaagccaggcagcatcgtccttcatatgtgtttttactactgacagaccttcagcaggttgagctgccttagtcttaggtgataacatttatggtgacatctgccagtcaggcagaggtgcagaaaggagagtttaatcagggctctgataaactgaggtgttgacagtgggagagattgagagttgcagaatgttatttaccccttgagtcttcaggattataaatcctgaaggcttcttttctcttcttctttactctcccttccccgcagtgttttcaagcaggttcattagtcttagtcttgagaatctgtttacctgtgttgctctttcagaaagcagcatccagagaacaaaatagaagacaggcagtctcctcagcaagatacttggctaaatatgagtcagcgtggttgctaacccaaaccttcctgttgagaatcccaggagtgcgttagtgtgtgtttcttggataacccccataaaggttttctctctaacccagtgaagcaaatgaaaaacaatggctagccctcatagtatacttctggaatgtaatttttcaatgcagcctccccctcattcatactagatgagaacttattctctgtgttgctctcttgatgcagaaaagaccttatctttgagatgccgggctgcgtagaattcacagagacttcattggatagtagcagtgacctgtccttctgtctgtctttgggtgactgttttttttttttttcctggagacacagtcttgctgtgtcgcccagtctgcagtgcagtggcgcaatctcggctcactgcaacctccgcctcccgggttcaagtgattcctctgtctcagcctcccaagtagctgagactacaggcacgcgccaccatgcccagctaagtttttgtattttagtagagacggggtttcaccatgttggccaggatggtctcgatctcctgacctcatgatctgcccatctcagcctcccaaagtgctgggattacaggcatgagccactgcgcccagccaactgtgtttttaattcatgattttttttccctcttttgttttgagtgcatgtgattcaatgggtgtcactttttagttgttttgtttttgtttttgtttttgttctgagacagagtctcactctgtcacccaggctggagtgcagtggcgcaatttcggctcactgcaacctgtgcctcctgggttcaagtgattctcctgcctcagcctcccaagtagctgggattacaggtgtgtaccatcacactcggctaatttttgtgtttttagtagagatggagtttcaccatgttggccaggctggtctcaaactcatggcctcaagtgataacttgccgcagcctcccaaagtggtgaggttacaggcatgagccactgtgcccagcttcagtgggtgtcactttttaaaattatgattcaatcagaatagtgtagtatttttgattgggacaagcgttctctatttatgtagaactacagggtgatccccagtttttcttgtcatttgcctctgtctttttcagcaaaagacattctttcattactgtgtctacagaaagaaattctgttttcagtgcctcattggctagattaagccaagatttactgttttagaaagatttacaaatacataagtcaagatcatttgtgcaggaagagcttttggattcagatgtgagattttgtatttgtttatagttgaatgtgtaggggatgatttattttatgccatttcaaggattggtaaaacagggattggtaaattgccaagtgtagaaatttgtgtaagaattatttagatatttacttatggtaggaagcaaaatattttagggtctttactattttttttttttttttttttggtcagcaagtggccttttagtgaaaaagacaaggactgttaagcacctaatatgagtccagcactcttgtggactaggtgggcagctgtgaaggatgaggttggcatgcctgccttgtctggcttgcccctgcatttctttatctgtgtgacctcaggccagtcttttgccatctttggactttggtgtcctcagcagtaaaatggaatccattatgtcatgaacactttgccttcctctttggattgtttggagggtcaagagaacctgtatcttttaaaactataaaacaattatctaaaaattatttggtgatattattactcatgatttttgatttagccactgtcctcaaggaacttttgatttgtgtgacaaaggtttatataaaaacaaatgtttagaaagcagtgtaaaataggatacaacctattgtggtcctttcttaagagttatgcattttataggaaatcaggaaaagaagagatgggtataggtagattagtcagaggaggattacaggataaggtgggatttgagctaaatttttaagcatgcttaggacagagggtgtgaacagagacctagacctagagcagagaatgatttcacccaagtgccgtggaattgaaaattgtctgccttcatatgtcctgtggttcctgggactcaccaccccttcctgccttcttgccctttgcacataatagttcttcttcatggaattctccccgactcccacttctctttccagtccagtgtcatatgccttatgacagatcatcaccctggtggtaagaaactactacaactaaatacaaaacagttcttgtccccagggaaactattcctctcagctaaaaataaacaaaataaccctacccatttgatcaatgccttagtatacattcaaccccttactgggtggggttgtggccatgccagttagagccgacaaccaaagagaaatcaccgtcactgcacaattaagcctgccctcctctatcttccctaccatatcttctggaagattccatcacttatcacacttaacattagctgctgttagataaggtgctagtggtttaaatgtgtcatttcattttgtcataacaacttcatgactactatctatagtactattattcctattttgtaaataataataaaacccctgacactttggacatttaatttgtccagggttctgcaactaataacagttactggaacttgaactaacccttaaactaaaacttaaactaagtttttttgcatacaaatataaaaaagtaagacaaacatgggcttaggaaactttccttattctttcttccctggattttgctgagcagtagataaaatgaagtttacgattaaataaataaagtaaataatttgagagagttaacagttaattaacagttaattgcctcaggttttcaagaatatattttctctttccactgtgagacgttatactgtgtaaacaaaagaattatttattctaaggattctgttatttcactttatattttataaatgagttgaatgtatattaaggtgttgattaaatgcatagggttattttgtttatttttagctgagaggaatagtttccctgggggcaagaagtgttttgtatttagttgtagtagtttcttaccaccgttgtggtgaaagacaagtgctgtagacatggcatttactgggtgtttgactgcttgctttctccaggtcatgggttctagctgaaatctaagcacttgtgttgagaggagtctggcgtagggctgtgacagcagcactgttcccattgacagcagggcttccgagaggcctgggtaggctccaagagcttccacatccaccgggagctaagcaaactgctctgcctctgggaaactcctcaatgtttgttttgttttttagggatctttgtcatcccaggagtccaggctagcttaaaattatctttgtccagggaggtcaatgaagagagagatgaataaggtaaaaatagagaaggcgttgtggtgaatgtggcatttttgctgaactttaagggatggtagagtttacttaagtacattgcatggaggacataagcaaagacttagaagtgataccatatggagtatcttagtggaagttttgatagaattagaggaaaatgtttcatggggtcacaaaattcacttaggttacaatttagatgcacagagaaaagtgtattattttgtgtataattgatctggactttctaataaggctcatttattcattgcttcctagggaaaaaaagtcactgttaaatcagtctggattaaaagtagactgagtctataatttacataatctcttcaggtaataattcttctctctagggaatgttgctcatctctcagttatctcatgcttttttgtagctcttctccaagatggggaggtatgtgggatagtgggcaggacagaggtgtggagtgcagagtattgaccttgtgctcactgttcctcacccttctctctggggcatcgtttcttgttctcctagttgctgaatgccgtattgacctccagtgctcatggttgcaagtgatgaactcatggtcagttcttcttcatttctctcattgagtaccccctggctgattccaagcctgtctttggctgttgcgggaccatagaaaccttgaacatctggctgtgactcccatttggtattggcctgaacattccaccttgcaaaccttattctaaagctacctcaatttatggcagtgatttccctctgagaagcttcctggcaagatttttagttagatctgggttggttctaccctgcacagtaatctggcactgttcaggaatgctaaaactctgtatctcctctgcctgaccacattgtggtttacattgatgtgactccacccccagtgttaggggtagcctaagactctccaatggaaaatggagctccggtgagtagggtgggactgttgagaagtggagagttgacacgtgtctacttatgtttctttcctttcttctcttttattttcctcacaactattctaatatcaaaaatgggcagaatgctcttcttctttctcctaggtcgtctttatgtataactaataaaatttagctcggcagagatgggaaagagaggataaaggggtaaaagttttatgcaatctgttctcaacataatttgatttgcagagctcttgttttgatgcagtatcttattttccgaatgtcagaagttgaatatttcttctttcttggtctttgcatatgcatttcttctagataaatcttaatctccccaaagtagaagcttgggccatatttggggaaaggtcgtgtgcttaaaaagtaaaaagaaaaaaaacacattattttatttatttatttatttttttgagatagagtcttgctctgttgcctaggctggagtgcagtggtggaatctcggctcactgcaagctctgcctcctgggttcacaccattctcctgcctcagcctcccgagtagctgggactacaggcacccgccaccacgcccggctaattttttgtatttttagtagagatggggtttctctgtgttagccaggatggtctcaatctcctgaccttgtgatccgcctgcctcggcctcccaaagtgctgggattacaggcgtgagccaccacacctagctagcacattaacattttataatatattacaagtaataaagaagtgacagataacattgacccagttcctttgaaccatacttttcaaactgtatcttgtaggattgatgaataggaagtttaaaattattcattttaaaatgggatatctgcctcttggggaatcacaacaaatacttgtttattaaagattctgagaaattgtgcggtaggaaaagaggatctgttaaatcttgactgtgaagcttgtaaaaaaattgttaaatatctattgatttctaatagaaaatagtttttaactatggctgtacctatcttactgggcagagttgtggccatgccagttagagcctacaaccaaagagaaatcagacagatatttgaataacttttcatataactttctttgtaatactttttttttttttttttttgccaaggaccattaccaggctgtaatgaaggtatttttcaaagtaagtgtgtagttcaaacctattcatccagtatttactttgaactgaacaccaggtaaaaatcattttctttgggaactattttttggtaaagtagtttatgtgatgtggaaactattttgtaacacgtatgcctaagcagtcggccttttgttagatccaattagagttttctcttctgattaaatgtgagactctgaaatgtttcgcttggctgcaggcaaactaaatcacttgggacctcttctgcgtcagctttctgcagatggagagtataatattaatactatttatgtttacataattctggaattcattatagacagaaatagccaggatgtacacttttctggagtaatgtaataactaatagaacttactttagagttcttctatgatctataaaatgaagaaatagccatcttgtgcctgtaagtatagtaagacttagaattatgtaattgaagaagcacagaattttggagcttggagaagctcagccagtgtctatatataccatatttagaagcagaggaggccagagaagttaaataacagttttaggatcatgtagtgagcgctagaatataattttatctttattggtaaactgaacagtaagagctaattaactttgtttttggtcaaaagattacactgacactcagggaatctgattccttttaagatcttaaaccaaatgctcattttagatgttaaattccattgtctttataaaatttcatttgctgaaaggaagtgtatttgcaaaatttataaatatgtgaagaaacagccttgacttttcctttgtaatgaaaataagagtgttttgtgactaaagataaaagagagctgcagctttgtttcagaagacttttgtcccctaatcaaactggtgtgtgtttatgagctacaatgaaatgaatttataacgtatttataagctacacttacattattattcccaaaagttcaaatgggctttaaatagaaaagtcacagcataattatatttttctgatggggataggggaattactagggggtatagtgtcaaaggagggaaagcagtgtgaatgtagatggagattctggcaaaatcctggcttttaacctacaaagactgggaatgaagttatattttgtcctagactttttattctttatgttgaaatttccatatcctaacacatagtagcagctgaaaagttatatatagaatgaagaaaatgaatgaatgaataaatatggatctagaaaattgtagccagtaataacaatattacaggagaagattttccatgcaacctagaaactcccaatttccttaaaatatatttgtctgatattttcattacctggatattagcagcaaaccatatatattggaatccagtgcaatatcaacaaatatttttccaagttaagacattttgtgggagaacttgtaagtgtggttcgatttagctttaattcaagacagctagtctcttattatctaaatgggatactgtactcacggtgtcaagttgattgtaatggggtatatgaaaaactcagctcaggctgagtctacagtatttagtgaattcagttttgacagtaagttttctgcatgtcaggcccagaattcacatgcttttccaccaaaactgggagtttgaagagaattatatacatacttggcccagtgattcactttaactgcctcattgttttagcagattattaaactaaacagtctgctatttaaacaagtttaaagttcagctttaaattttttgaagatagctttttgaagactatttcctcaatgagttaaatgagagcaatacctatctcagatggttttggtgaggatgaaatagatcatttggtatgtcagctgctgagtgcagttcctgaggaggctgttgcaccagtagctagtaattccttccctactttcccttttattgtgttactgtgttataggtcaaaatgtaaataactgagtcaattctgctctcagtgctttaatactcccttcattatgttcattgcttccagataaaatactggccatctggttaaatttaatctcagataaatagcaaatcatttttagcgtagcgttgtcccaaatagtgtgtgggacatacttattttaaataattatttgctgtttatttgaaattcaaatttaactgagcttcttgtgtttttttggcaaatctggggactgaattactatatgctatattttacattattagcagttgatttctttttcttattaaagatattttattaaataagttcataataaataataaatagtagattgttgccagttatttgtgcattaaaataattatattttataatgaaagacatctgtattaaaataatcagatttgatataaaaaattggtataatttttattataaatgcttgtgtcccaattattcttttttagagacagagtctcactctgtcactcatgttggagtgcagtggtgtgatctctgctcactgcaatctctgcctcccaggctcaagcgatcctcccacctcagcctccctggtagctgggaccacagatgcccactaccatgcccaactaatttttgcagtttttagtacagatgggatttcaccatgttgtccaggctgccaaactcctgagctcaagcaatctgcccaccttggcttcctaaattgctgggattgcaggtgtgagccaaagaaccagctgtgtgtcctaattcttgaatgaaaaaactgggttttgggggagaggtgtgtgagaaagatggtgaatgtactttttgttgtaaatcaatttactgataatgtttagtaattaataataattttaactttaagtagtgaaatatggttatagcaaatcacttgaatgtttcagccacacccgaaacattgtaactggagagaatataagttttttaaactgtggagaatagaaagttaattcagtctaggtccagcaatatgtttaattgagctttgttttatattgcttcagcatctatttactttttattgagacagagtctcattctgtcgcccaggctggagtgcagtggcacaatgttggctcactgcaacctcttcctcccgggttcaagagatttttgtgcctcagcctcccaagtagctgggattacaggcgcctgccaccatgcctggccaatttttgttcttttagtagaggcgaggtttttccatgttggccaggctggtggtctcagactcctagcctcaagtgatccacctgcctggacctcacaaagttctgggattacaggggtgagccaccatgctggcctgcttcagcatttaaaataataatgaaaactttttttttccagtgcaacattgtacttaaaatatttataaattgtaaatctctattttgctattatgtgtacttgttactttgtagccttttaaagcttaaatggataccagatttgttctgaatgctattttaaatgtttttgcattttctttcatatacttaatacttttttctaattaacagatgttagatactcaatatacaaaatgtgggatttatggaaaattagacagaagaaaaattacccatggccccattacctaaagaaaacaactggtagtttttaggtattttagtctatacctttttctctatacatattttagattggtcataattattatattactatttgataatatagcaacattacataattttaattttaatggctactgaatgttagatcctgcttaatacagtaaattactcagccactcccacactgtgagatgtttaatttggttgcagttttttatttgaagtaatactgaaatgagcaattttggtcatacagctttttgtatggttatggttttgctttaggctagttgccggaagtgaattttaatggttcaaagaagtatctacattatgagattccagatatgcactttcaaaactagaatctgaaaggattatgcttatttttgtcaacactagcttggtataagtttctgttttatttcgccattggcctttcttacatttccaaaagtttttgttaatatactaataattaaaaaagttttacaggctgggcgcagtggctcacagctgtaatcccagcactttgggaggccaaggcgggcggatcacaaagtcaggagtttgagaccagctcggccaacatggtgaaactccatctctactaaaaatacaaaaattagccgggtgtggtgggggttgcctgtagttccagctacttgggaggctgaggcaggagaattgcttgtacctgggagctggaggttgcaatgagccaagattgcaccactgcactccagcctgggcgatagagcaagactctgtatcaagaaaaagataataataattgtacagttctttgattattattacggttggacctttataaatgtgtttggtcactgacatgtttgtggtcacttttatggtattttaatcaaaattttagagtcacactgggctgtaggcacatgaggagggcatgatagatatttgttgcttgagtatttgaatgtaggtagaacatgtaaaattgttatcattgaacagtttcttgcttcatcccctttatactactataattttaaaatgcttttaatcatcaaactatgctgtacttagaatactccgttatttcttacatttaaacaaaattgtttagccacaataagatgaacacaaggtcagttagaaacaaggttactattactctgcgaaatgtgaagccaattcctttttccatgtataagcttcagattatatcactttcagatatctgaggattatgccaactgttgatcagagagtacacacaacaaatactcactacagctgctttcttctttagtactaaatattctcattaagtgcttttttcctattcacttatctccctctttcttttgtgtacattgtactgctccaccccaccaaagtgtagaaaagagaaacaatcctttttctaaaacacatttgtttcactcttcagaaacaatggacaagaatttgaaggattcagcataccagttagctttctacagcttgctcccgtagggaacaaatttttgcacaaagcaaaacatctatctggcctctgccagtatcccaagttttgaggcaaaagtagtagagtccagcatttaccctgaggagaggccttagatggcagttgtgatttcactctagaatctgaattcttagaaaaaagaaagtatacagttcagtgtcacctcttagttgttgcacagttgtctaaaactatagtgcagtagatgaatttacagtttttttgaccctaaatgggttggcaattgacaaagatccaaatggcacagtcctttttgtttcatatttactctcaaggagcaaggagagagaattatgtaggctgttgctatctatccactctcaagaaatacagctttttgagcatattcccttagcattccacatattggcattatttgctttcaagcccatcgaagtatttttactgttttttgttagagacgtgctacaattggtttaacatttattggctatatcctgtctttggtgagtgccatattaatctactcaaaatactaagcaatatgtggaaatttgaaaacaacttacaacactataaatatgtatgtaaccacatattaccaatggttgaatagatcatttttgtttctatttcttgggggagtatataatgattttctggaattaaaaaatcggtgcaaggggagaaagtgtaaatttgatgtgggaatggaaacttacagtaacttgtgttgttgcccagaggacaagaatacagcaagattgggatgtgagcttacatgaaacatttcatcacacagacaaagcaaatgcaatttgatttatattttatgtggcaggtagagccaagttaaatgaaaaagtatggtctcaaaacatccaaaatacacttcatatttaagtcttttctgctataaagacaaactaaatggtgtttcttgaagccagagaagaaataagccaagtataaaatcctgctgtggtgcattgtgtccttttcaccctttggtgttgagtggctacctcagtgtcaggcacatattagagagttagttaatactgattagattagtttggcatgattctttaaagaagggatcaagcgtcttcatcagtcatgtgtgcgtgtgtgcatgtgtatgtgtgtagtgcacaacacagtgttagattgggtagaaaatgtactggttataagttacgacgtttatttgattccctgtgaaatggaactgagaaaaacatagcacaataaagaatgatgaattagtgttctcatattaattttctgattcagtgactatatttggtcatgataacaagaatatcatgttgcatagcaggtgtatctcaaaatgtgtagtgctcaattaaccgttaggagaaatagaagtttatttctcattgacataaagtccagaacaggttttctgaccaatagctggctggctgattagcaatgcaaggacccaggctaatttcattttatggttccaccatctttcatgtatggcttccattgtacttatgtgcatgaaacctactgaaggcaaagaaagagcagggaatttgcactttggaggctctcatgggccaggcctggaggagttgcatgtatttttgcccacatctcattaggtagagctgaggcataggtcatcacctaactgcaaaagactaagaatgtagtcctgctgtttgctcgaatagctgtaatcagctgcaattcagtcttcttaaatcactatttctttgcatttgtgaataaaatgacttcaatataattattatactctgatctaggatgattattaagagaattgatggccctttaaaaaatcaggcttatacaaatgcttgagtacaaaattccggagtttaagttctaagttttaaagaactgctaagcttcgataccttggtcatgacaactttctcaaatgccagggagggaacctttgaatccaaatattttctctgtatgaaaggcccacccacaataacattcatttgcagaaggaaatgatttattgctccctgtgagtgagtgccaaaaaaagttttctcctgaaatatcgtgccagtatttccatataaacataattttagcatattctgcgatgtggaaatttatttttcatagaatttataggttttgagatgtaaagggtccccataaagtcgttttgcagcttgaaaatgtgaaaatatttaacttttatagttcaaaaattttatgttgtagaaatgatagaaacaatatctagagaatgtttgaagactttttcttccaggttatgtggtctgcttgccagaggacattgttttatattcttattcattaaacaagcacttattgagcattaactatgtgctatgtgattaattcacttagtacctagtcctccaaaatttaaagtcagttagaggagaagcttcatactgttatagaagaagcagggaaggagcaacagcctagtatgttttaagaggctttgtgaagttttaagagaaaatataacatatccacttggccttgaaaaaatcaatgggtatttgcctggaatggaaaggggttagagtattcaagacaaagaacagcatgagtagagcagtgaaagctttgaaagctcatgacttggtttggatgctggaattccaaaaaggtagacattttgtgatttatggaggaattatgggatgtgcacctgtcccagttgatcagactagcgtgacagaccatactgagacccttttgcttttttctgtaggcactgggaagctatgcagggttttatatctcattatatcaatgagataatcagatctctaattttagaaagataaccctgttagccctgcaaatgatgtgtaaatgttgaaaagactagagacggaggagagagggtgagggcagtccctgggagggggagcacggaatggacaggagagagagttcacaggtggaattgctagaattggggggttagttggtttttgaaagtgatttttttggtttgtcattagaaattgaaaggataacagcgtatacaattgagtagcatatttgaccaaaactttaataaatttattttaaatacagtttatagaccgcatcatttaccaaatctaggacaacatataaaagttaaaatgcacacaaaattaagacaatttttattttcttattgtgacaacataaggtgtttgatagtttaagctttttttttttttctggcttcatcttccatagggtttttaaccattgttctaattttattaaccaattggtttattaattaagcaaatatttacagagcacctatgtatgctcagaaatgatctaggtcatgaagacaaattacaaaaccactggccacatggagtttatatttgattaagggaaacagacaatgtatgaaataaataagaaaatatatatagcggcaggtggtgataaaagagctgtgggaaaaaaaaggcagggtgaaagacatgtgacacttgagggttcttctgttttaaagaaggtgttaaaaaaatcgagaacggccactcagattaagtgatgcgatgagagatctgaagatagtgaggaaaccagctgtgtggattcctaggggaaggaagtagaggaacagcaggtgccaggacttaggtggaaacctgactggcctgacatgtgaggagcagcaggaatggtgacatggctgggagagtttggcgaggggagcctggaaagagatgaggtctgagagggagatggagggcctatcactggaatcgtgcaggctgttgtcaggctcgatcttggcattttctctgaattaaacaagatgaagagttttgagtagaaatgtgacatcatctaagttgtaaaaggataggttgagccgctatgttgagagtagtctgcagtggtcccaggttagaggcagtgaaaaggctatctcagtagtccagttgagagagaaatgatggcttagactggggtgatagtggtgggggtgctgagaagtggtcacattcagactgtatgtcctgatggattggtggatatgtggcatgaaaaggaggagtcataggtgacactaggatttttggtctgtacaactggaagaaggaaacaatatcaaagcaagggaaaacaagaatgtgagatggaaatatcaggagttagttttgagcatcttaagttgctatgcctatgagatatgcaggtgggactgccaagtaggcagctgtatatacaagtcggaatcagatcaggggagatgtttgaatatgttgtgattatatttgagaaaaataggattaatttaaaacgggttgcaaatgactcaaatccgatctgttcaggattaaatacttaaaaagattataacactttagcatgaaaaaagaattgttttcataaaaatgtgtttctctatgaccactttgttttattcatattatctcaaaattattttttaacaggttctcatttttataaattcataacttggaaaggaaaacttaagagatgtttaacttgaggttcagaaactaaggtttcctaaatgcatgacatgttattgcctgacataaacattatgcttactaattgttgacctatcctccttctgcttttcagtaataagtttctgacaggctcatacagtgagtgccaaagagaataattgcttggtggttagagtgtgggttgtggaacacatcctggttctgcaatcatgggttggctgaacttaggcacattatttaccattcttgtgcctcattttccttattagttaactagagataatataagtattataatgcaatacccttatttaattgttgtgagaattaaataagttaatgcataaagagtgcttaaaactgtgctggatgcatagctaatgcataaatgttggtgtatttttatctgccattaaacgtttgctatgtgtcaaaacatactgggtacttcatatatattattgtactgtataatttcaaactatgttttttgcacaggatatatttaccacacaaaataacaggattaataggaaactaaattttaaaaaaggtattttaactctaccacctcaaattaatgaggcattttcatttatttcttttcctttattttttttttgagaaggaatttcgctcttgttgcctaggctggagtgcaatggcgccatcttggctcactgcaacccctgcctcctaggttcaagctattctcctacctcaggcttctgagtagctgggattacaggcacctgccaccacgcccggctaattttttgtatttttagtagagatggggtttcgccatgttggtcaggctggtctcaaactcctaacctcaggtgatccacccgcctcggcctcccagtgtgctggtattacaggagtgagctactatgcctggccttatttcttttatagtccttagacctgttcacttgcacattgtgtgtctttttgtcatttttccatgttgcaatatagttgtaatgattatacattttaatgtaaccaaaattttttggtcatatccttgttgatggatatttagactgttataaacagtgcttttgtatactattatgaattatgtattttccagcaaataactctcctttaattttacttatttcttgaagttaaagttttaaaagtggaattactaggaaaaggatatgctttttgttctggaaacatcttaccaaatttctttcacaacgtgccacatacgttcttattagtgatgtacagtcaatattggcaatattgttttttattttgctaatttgagtagacattgtggtaaataacatggtgctggaattagactgactggattcagattccagaatcacacgtggctagatgtgttagcttggaaaagttacttttacctactctaagcattggattcctgatctgcaaagtgtgatttataccatagcctatgtactttggttattataaggactaaataagatgatacatttaaaaatggcatagcgtctgacattttataaggttattgctgttatacccaatttttctctttctgcacttttggcaattagtgtgatctgttgtatcagttttgatgcttgtttacatttttattacttttgtgtgaattgtcatttcagagatcttatatattatcctaaaaaatgaatatgtttttcatagactgtagtctatgtgatgttggcattttatctgttatcttggctttgtgtagtttccctggtttgttgttttctctttcttttacttatattttgttttaaaagcatatgattcattacaatcccttttcatatatctgaaaatggttctgttttatgctagagtttttatttatttatttttgagatggagtcttgctgtgtcaactaggctggagtgcagtggcacgatctcagctgactgcaacctctgcctcccaggttcaagcgattctcctgcttcagcctcccgagtacctgggactgcaggtgcacgccaccaggcccggctagttttcttttcttttcttttcttttttgtatttttagtagagatggagtttcactatgttggccaggctggtctcgaactcctgacctcgtgatccccccttgggccttgcaaagtgctaggattacaggcatgagccactgcacccggccttatgctagtatttatatgatttaaactgttttagtgtaactcttcactctgtttggaatttggtacaaaatgtgaagtacggatctaaattagtatttctgcattattgaccattcttcattttgccatcatttttcaatagctaaggccatttttctatagaaattaatacaaaatgaatatatgaaatacttcttaattaaaaaaatctagctactgcattgtttgctacttggtttatcttctaaaaagtgaattttacagaagctacagtaacataacttagaaggcagtactatggaagaaaatgaaatggtccaggctcatccagttcttattcttaaaaccttatttggaaaagaaaggcacaagtaattttctttccttatatgtctgtttgtgtaaagataggtaatgccatggtctgaatgtggcccccaaaattcatgtgttcaaactcaattaatgtgattatattaagatgtggggcctttaggaggtgattaagtcatgagggaagaatcctcatgaatgggattagggcccttagaaaaagacttgagagacttgattcactttgttctgatattctgccacgtgcgggacacatcgttcctcccctccagaggatgcagaaacaaggctccatcttgaagccaagagcagctctcatcagcccttgaccctgccagctccttgatcttagacttcccagcttccggaactgtgagaaataaatttctgtttacagattatccagtctcaggtattttgttatagcagcataaatggactgaggcaaatagtaatttcatacccataaagtcctttgagaattcttggctggtatagaagacagcagtttaattctgagaagaatatgccataaaatctctagaaaatttgttttggggaactgaacttttaaataatacgttatatcagttttatagtttcagaaatttctacttttcctgctttgatgagttcagattctggctctgctgttttctaggtacatggcctttggcgtattagccttagagcctccttttttttttcttggtctgcgaaatgggaattttcctaatgtctccctcgtaggtgggactgataattagccatatgcttctgttgttctattgcattcagctggtatcattgatggacctgtgcctgtgtcaaattggttgctaagtatatttaaaacttttcctgctcccatgattactgtgagggtgagagatagtgtctgccctatgcttcagggtcagggtgtgggaagggcgatggtttcccctaagaaaaggtatcaggatcttcagagaaagagaaccttttctgatggcaccacacttttctccttttccaactactttcatgggagtttcttattctgatggaatgttttatgtgcctcaaactcatgttgaggtggcaaaaaccagaaaccatcactctaaggaggtggttcttaactagtgcctcacagtaggatcacctggggaactttcaaaattaaatcaattaaatcagaaactctgaaggtggggtcaaggcattagtttttcagaagctctgcagaggattccattgttaacccaggtttgagggccagtattctggattattttttcagtaataaaaaagcactgctgttctttgtattctgtctcttttttattacttttttaaaggactattttatacaagcctctgtggtaaattgtgcttttagttatacttttattattttagtttagtattctaggatgttatttattcaagaaataatacttagagttatatactgctaagtttgtatcaggggctctactaagtatcttatatatctaattcatctaagtttaatgacaactatttagaataggtactattatcatcccattttatacagaaggaagctgaggtacaaagaggctaagtatctttctgagggttacacaactggtttgaggcagagctgcatcttgctggtatagttttagctcttagattctatgctatgctgtctctattcaagctcctactatgtgccagagagtattgtaggtgcttagattaaagcagtgaccagaacagccagaaatcctcctcttgtggagcacacagtctggtagaaattctacagattttattttaaaatgctcctgaattgtagtcaagatttagtatctcagcaaatattctactatgaagcgatttcctcatcccatgtaattacttataattgtgcatgattgaacctgcatagtagcctcacttgaagaaatgttttattagtctagactgattttgggggaggggagatgaattagtggatgtatagaaaagaatatcaagcctgtttaattttctcttataggctaggtgtgatggctcatgcctgtaatctcagcactttgggaggctgaggtgggaggattgcttgagtctaggagtctgagactagcctgagcaatatggcaagatcccaactctagaaaaaaaatttttaaaaattaattgggtgtggtggcatgcacctgtagtcccagctactcaggaggctggggtgggaggatcacttaagtccaggaaatcaaggctgcagtgagccacgtttgtgctactgcactccagccagggtgacagagtgagaacctatctcaaataaaatttttttttttttctcttataggcttaactttgggtcagagcatacagatttatagttagaactttctcagtcctctcagagtcaagggccataatatatttctccctcttttttcctaaagggagaaagctccaagttttggggttttattaactcttaccgctacaacttctctttgtggcatccgattctctcagagtgctgtgataccaatataagcagctcatgaactgaactaatttgagctaaaatgttactggttggtaatagtttagggagctgccctttctgataccaggtgcattttcacaggagttttgatgggagtgtccaggaaggagctgtgtgggaattcagacactgtggcgtagccagtggaagtatttttagcccggggttctttcatcagccctctagtcacaccacttaaacagctgcttactctgtgtgtgtgtaaacaagttcttctcccttctccccgaggacctagatttgagacccttattcagtccttcacacatataacattggttgtgaccttgcactctaatctgaacactcttgagattttcaagtacatgctgacagggattttgtgagaatatgtaagtatctgcttaatggtaagaaatgaaccttttaacaaggagctcacccagtagtgtacatttgaacacagttggtagtaccttcgtagtggaacaaaattcacctaatgaaatatttttttgaaatgttggcttgaaaacatttaattcagttgtagttacaggactgctttcctgccaaaatgaacagctcctaaaacagtctgtcatcctgagatttctcccctgctttttcttcttagccctatccagcttgtgtcataattagtgagtagctgaatgaattgaatttgcctgaatttattatcagtctcaactacaaaactaagattcttgaagcctgggagtgcataaggttcagtgtattattcctgtacctcacacagtgaggcccatcaagacccccattatgtacctgtggaagggaagagagaaagaattttctagggtgccagaccttgaatgtatggagcagaaattttaattcagatggtctgatgccaaagttcatggtgtatcttccccctagaatcagttattattaaatgaactaaaaagccattggcgtaaaagtcacccacaaaaaacatttgtttctttggagaaccttacataactcaagattcctgagcaatttgccagttgaagtaaccggattgcttgcctgtcttcccagtgggactgtaaactctgggagggcagggagtgtgctttgttcattgtttattcccaggtctatgcagagtgttccatggataagtattttaaactacataatactgtatgattaaaacatgtttttctcataaagatatggtaatgatttgcaacaacagaagccttttctctgaggacttgaaagagatcagaactttgaaggatacgaatttattcaaagagcagttagttgtacgtagactcagattgtaaaataaaaataacgaagtcagaagtgtagatatattttcagttcttacaggtgttcacaaaatcatgtagacactttatactaaaaacttcatgaattagaagacatgtaaattttaaactggttagaaaggagaaccaattcattctctactgttggcgctaacttcaaccatataacatatgttgctaaaattagagttttcagaaatatggtattcataataattagaataatggattctaagagagatcattagagtgcatagtgtgctttaactcttaccagctgtgacagggcatgccattgctgttccttagattttgcctagaagctttaaaagaatctgtttataaactggaaccagtacttaagtgtcactggattaacacttcagaatttcatgtttacacatatatttcacaactctctttaatatgctttaaagctggctgagacttatttatgtgttacacagctatacttggttccataatctatagctactttcttttgaaattaaatttattgccacagaaaattgtggtgaaaataaagccaaaaggtgttgcagcctactaattgaaaacatgtatttggtaactagtaagcattagtaagcacttaaggggtaagttttatttaatttcttgaagtttaatactaacaaaaagtgtttaataatattagcgaagttttctcagaaaataatttttgctagaatttagctagagcatatatagatatgatatatgcatatattctataaatattttttaaaattttaatttttttacttaaactctaatctcaaaattcatacaaaagagttaggtttggcttaagatagtgttggaaatggttcctgcctctaaggatcttaaaccaatcaattaagagttcaataaaacagcagtacacataaaacattgaattaaattcgataaaatatttattgaatacctcctatttgttaggcattgtattaggtactggagatatgggagcgaatgagatacaagtgttaaattcgatggatttaattatacatgtaataaggataaggcttataaatgctttcttgttgaagtctggatggtactgtgtgccaatagctagtatttaaaaaatttggcttgatttcagtaaattcatgtcttgtgtgtctattcacctcacaggtaagtgaagtgaatcttccaactcctctttctccccggttaatgaaacacccctttctgtgtgctgtgcatagctctgtggtaacactcattgacttattctgttttggtgattgtttatagtcttagtctgttttgctctgctataacagaatacctgagactgggaaatttataatgaaaagatacttatttctcacagttctggaggcagagagaagtctgagatcaaaatgctgggatttggcaagggccatcttgctgtgtcatctcatggtggaaggtggatgggcaaagagacaaaagggggccagataagctcttctgtaaaggcattaatcccaccaatgaagatggagcctttatggccccatcacctcctaaaggtcccacctcccaacaccaccacaatggcaaccaaatttcaacatgaattttggaggagatagacattcagaccatgacatttattatgtctgagttttaacttagaccatgagcccctagaaggcagagaccacttgaatgtttacagtccagagcttctcaacacattggacatatttcgtgatggttgggtagatgggtaaattaataaattgaaaggaaagggggatattgcaaaatagagaataaagaatgaggagcaaaatggatagggtagaagaggaagagaggaggaaatacaggagatggatggccaactcccttctcccttctcttaagatgagacttgatgtgctctcaagtccctggactgggtgctccctatcagtgatactagggggctgtaatggatgtggcttcaagagagtctctagcatggcttattcaaagtcactgccatagacttagcacccagatgactactttgggtgcattccaggaatgcactctgacttaggcatctgagcgatctgtttgcccctacttagtctctgaaatagcaaggttacctcatatctgccaagccaatgggaaggatacaaaggcttttttggggtaatagtgtttttccacactgcattggtgacttttttgtcagctaagctttgagtcatgattgcatttgaatgggaaatgatattcctaaaatgtgtgccttagatattgttatatttttgactcctggttaaaaagtattaatgtcaaaaaataaattttttcaagttaacttttggtatctatgcttggcaaacatttccacaggcagccactgtatcctacactataagctttcctgttaaccagaaactcttttaattgcttagttgaaatatattgaaatcatttgttaatgagcttgaggtgctctttctcacttcatattctaaattaacctcaccaaagagtgacagaaggtgtaaaagagttctgagataaaactgctttccaaaattttggttaaagctagaatggaagtgggcagagaagggctcctttgcttttgaggggtcagtgggagaacggatgtggtagaaagttagcttggttcactaccatgcttctctcctggtgggctgccacatttctgtgggtggatatgtatgagttatgagaaaaggctgggggcaaagctggtgttcggatctatgttttggggagctgtgccctcattttggaggagccagtgtctggaaagtgattctgagagacaactagcagaggagaaggaattaatggtcacagtttatgaagaaaaagaaccaggattgcatactaagccctctactgcacacacagcctaacctctctataaggcaaagatgtaaccatacatatatttaccagggctgttttctgactgagatatggaatagagaaaaggttagatatgcctgtctgagcagcctacagattgaagaatagtttttagtatccttttggtttttttttttttatttgagatggagtctcgctctgtcgcccaggctgcagtgcagtggcatgattttggctcactgcaagctccgtctccttggttcacaccactctcctgcctcagcctcccaagtagctgggactacaggtgcctgccaccacgcctggctaatttttgtatttttagtagagacggggtttcaccgtgttagccaggatggtctcaatctcctgaccttgcgatccacccgccttggcctcccaaagtgctgggattacaggcatgagccaccgtgcccagccactatccttttagtttttagagtttaaagccttatttggtgtttaaatttctttcagaattataatgaagtaaaatgaaatgtttaattgatctaattcaagcatttaaagatactaacatttttgtctgagttttgatgcacgaatttaccacttaattctaattagcctgatcattgccagcactttcccatgcatccattcaggaggaagctaaggaaaccttccccaccgtaactttttccttctccatgaattcacctgttaatcagatgcttctttgtgctggtacacagttctgtggtagcacttattatatggttcttgtctcttcagtgtctcatttatttactgcactgtgagcatgtgaacagagcaagtatcttaatcacttatggagcttccaaacttgaaccacttcatggtttagccccaaatgcagacactaaggtagtgtatccttatgctatttgaactgatctgtttttaaacattctggttattttctaaaaagctcatttgaataaagaaattataaaatgagaactcatttttactgtctatatgacatttagagaattaattttgtctgagagaatgaaaacatttacttgtgaaataaggcaaataagaattttatttaaaagatttgattcacacagaaaaatttctgtttaattgatcttggggaaaaatggggaaaatttggtatgcttttgagtaaaaacgtttttatattgggtaaatttttattttataaaataaaaatgtaatgaaagttatatatagtgttcaaattattgtctagtttttgtgttttacaaaattgtagttactgaaatttgtaacatggactccttgatcagttaactaatttaaatggacattttgttacattggtgcattaggtagaacaatgttggatgcaaacagaaaatttcaatacaagcttacttgaaaaagaaggacgtttagaatctcttttaagtggatgttcatgtagttttgatgccagaggtgattgatacagactagaagctcaataatgtcattccagactcatgttaagtgttctttttgtggatgggagttcatcgctagtctctgacattctgtggtggccccatcctctggctgttagcagcagataccactttcagctataagaatagtactactgggtgtggtagctcatgcctgtaatcccagctactcaggaggctgaggcaggaggatctattgagcccaggagtttgagaccagcctgggcaagaaagtgagaggtcatctttacgaaaaatttttaaaaattagctgagcagtgtggcatatacctgtagtcccagctactcaggaggcagaggtgagaggatcccttgagcccaggaattcaaggctgcagtgagctattatcatgccactgcactgcagtctgggtgatagagtgagaccctgtctcaaaagtaaaaacaaaacaaaacaaaacaaaatagtaccatctttttttttaagatgggaaaaaacctttcccagaaatcttgtggcagacttgccttctcattggcaagaattgggaccctttgattttcctaaaccaccattgacaaaatacatgggtgacagtgcctggttgcaatagttctggggagtaaaacagagtactattgtaatgggtaaatccagactgcctttatacaaatatcaaaatgctttgcagaatgtggaaagaaaatggattgcattgcagtctatttttctgaatggaaatagttttattaatataagaaaataaaaacaaattttataagtacacattacatttgtagagaattaaaaataccacaacaaaggatattttttctgtttttctaaactttggagccaggcatatggtaacatttcttttttattttaggcttttgcattacagatattactttttccccagtgccattggttattggaacaggatctaaaggtttatttttatttgtggaaaaaaaaattttaaaatcatttcctcaaaaatattaattcatatttttatttgtttatttgataagggccagtcaatagataaattgacagaatggtacttaatgtagaattagattttcaaagataatgtgaagcataagtgaaacattagttcttaaatagggactgcctagagatcttacttgagccttcggctgtggtctttcggtagagttgataactggtgaagaatattaaggttcagaaaaggtctcggggatattgcagatgttatttctctgtcaaatgtagtcatttgcacacctgcagcactggggtcttctttcaccatgttttaaagctcactcgggctggactgcttccaggttcacttcctgctccctttgttctcttttgcactgtgcttttctgctgtgtccctgctctcacttgtttaagtcattttcagaggagaatttgttcttgcagattttagattttcttataaaaaatgtggaatcgttgaaattccttttacaagacttttttttttattcaattactttaccatttttaaggtagggagaatctcaggaataccaagcaaagaggaacatctggaatgttctatacattaataaaaatggaaacatgcataattgctaccctgctaaagtccctgttattagtaatttaggaaacattttattctgcttacccaaaaggaaaggtaaatatatgcttataatattaaattgttgaaactgaaatcaatagttttatattagtcgtatcgatttcagtgaaaaaccctacctttccaagagaaacagttttgccaataaaatgtaggaattaaaatatagtaactttgccaaacagatgtaaattctttaattaaaataatttatttgagtaaaacttgcagcataatactactttcaaatgatataattacaaaaataagccaaaaatactgaattctaaaaaatctgtaggtttttaaggaagtaattttcctaatatgaaatataatctaatttggctcattaggggaatactgtttccaaaatggcattttatgtaataagcgttcccttttcctcattcctcatccccctctgtgtctctctggttgagttagttgaggcttcaatagcaaaagcacttccttttgcaagtttagagttttaagcagtagttcctctgtctttgacttgagacagtatgattatgttatataaagttcgtaatgccttttgaaaatctctttaataaataaccctttgaaaataaagtgtatatatactttgtttataaaaagtgtatataaactttatttctgtttctcaaatatgtttctcaaatatatgtatataaagtgtatataaactttatatatttctcaaatatattatttatggttttgtgctgtttgcacattactgcctcttgatacaggttcaacaaataagtatggaatatctctagtttggcagacactgagttaggcatgtgagcagacaaaaatgtctttccttagagagcttactttaaaaaattctattaaatattcactgatgcctttgttcagcatttttcccttctttttcttctcctaatgattcattcttgctgtttttgtggcagccagcagtgcctagcttcccatgtagcagtatttgaaagtatctgtctatcctatgatgtgaaagattttaaatatttatttattttcacatgcagtttttgtgattaaaagggaggagaaagagaaaagttgtcagataaaatcaacgggatgagtataaaagttttcatcgaagcagcacagtgtcatggagagatgactggaatgtgagtcaaaagacatgtcatcacctagttccataattggtgactcacttgcttttccttttctcagttaaccaactcatgctaacacagagagaaaaatgcctgccatatcagtttcacacaaggtgtttgtaaacagcagataaggtcacgtgtgagaaaatgttttcacttgaatatacgtaaagtgtttcattccattgccttacacattttattcgtaaatgtgaacaaataaaggtgaatttgtggctttcattaattcaaatttaaaatagtgttaaattatacctagtttctaattaataggattaataactaaaacattgtgtgatcttgatatttacctcacacccagaactataaaaagtagcattgcaagaaatgagatacatgattgagtgaacagtgcctgatctgaagttgagatgcttttattttatttggacaggaatcatacatggtaataatttgggttatttccaataacagaattttttctgctgaaatatattttaaagaaaacacttttaaagagtccaatgtagatttttccacagtgtattctacagagcatattaagatgttaattaccgctctttgattacaggattccagggtcaaataattttgtttgataaacagtataaaacatattaatttactgcagaactttcagggcttccagtatgtgaatgtgtatactgaaatgttaagagggcatatagaatatgcagcattttccagaattatttgagaatggatattttttttcccttagagaacatctattaacaagcacccttggactctcatcctcaaagtgaggtcccagcactatgagcatcaccatcaatctggaccccaccccaaacctattgaattagatctgatggtagggcctagatgtctgtgttttaacaagccttccagatgattctgatacatgtgagaaccactgcactagggtttcctggaacatagtttaaaaaataaagagctaatcatttaaaaatatgtatgcttttaaaagaaggcccttctattctgagtagtgatatttaggtgtcaagtttttatgcttagggtgtgtgtgtgagagaagtcattaaaaaaaaaaaaagataatgcattcttgccaagtagaaaataggtgtggtataatgaaaaaggtgttgaaagtttatgattcatgatttagtaaaagtagagctggattaactgtagattaaatatctgacctcacataccacaccctgactgtaccttaagtttatgcttctgtgagttaaagaagtgcaagtagaattcctgaggaatttagttttcacagggaggcgtgcttttatccttttctttaagctttctctctcaatttattccaatagggcataatttctttatgatgttgctcttaggaaattctttcaacaatgattttattttccttttttttttttttttgggacactgcagcttcgacctcctgagctaacagatcctcccacctcagcctcctgagtagctgggattacaggcacacgccactatgcctggatgatttttgtagaaacagggttttgctacattgccctgactggtcttgaactcctgggctcaagcgatcttgtcacctcagcctcccaaggtgccaggattataggcatgagccatggcacctggccttcaacagttatttattgggtccttagtaggggcttcatgggcactgtgctaggtgctggatgcacaccggtagataaaaggagcacagtgctgatcctcacagaattaagagtgcatagaaatggagaggaaaggaaacagcctttcctaaagaatgaagtgctctagtaaggaagtccaaggtgctaagggaaaaggagggatgatacctgttataatccccaaggtcaggattatgtgacatgagagatgtagtttattatattttacagtgattggcttgaaaaatagtgcagaagatttgtaacgcatttctaaatttgggaaggataaacagtagcttggaagcttctctttgagcagtaggcagttttatttagataaaattcagtgcatctatcttttgtaggaagagtttgagaaaaaataattattctgaatttaaaaatattagaaatgagacttattatgtaagtatatgacatggagttttcatgatagttatcagctagttctgataagtaatatatttaggtcatcatagaaagtatgtttatattaaataactcttgcatatgtttgttacagtaaattttcttagagataaataataaactattttttggacagcttcaaaagggaaaattcaaaatttagaaaaaacattagaaatgttaatatgggatatttttgacttaagacattcagaaaagttaatgttttaacacgatatgtgattatagaattctattcatatatgtgttcacatttatacactttgctatactttgtatttataaatataattctgttagataaataagtgattcatattttgtcaaaactattttaaaatttcaatatttaaaatatttttgaatcactggttttcgttaagtggcatcatagatgagatttgattccatgtagcatataattttagattgttcctctctcaccccttttaaactccttcaagcattgctattactggggttgcctttgggaaaacttacttctagatactaccatatatctgaaatagtagaggtggatgttaataaaattcataaaataatcatgtattactttttttgatttaccactggaaggaaatacagtcatgtgcaatataatgacgttttggtcattgagacccacatgtgtgacagtggtcccataaggatgttgctgaaaaattcctgttgctgcctagtgacactgtagccatcgtaacgccatagcacgacacgttactcacctgttcatggtgatgctggtgtaaacaaacctgtgctgccaatcatacaaaagtatagcacaatgacaattatgtacagtttatcataattcttgataataaatgactatgttacaggtttatgtattgattccactttttgtcattattttggaatgtactcctactaattataaaaaagaaaaggttaactgtaaaaaagcctcaggcaggtcctttaggaggcattccagaagaagacattgttaccataggagatgacagctctatgtgtgttattgcccctgaagaccttctagtgggacaggatatggaggggaaagacagtgacattggtgatcctgaccctgtgtaggcctaggctaatgtgtgtgtgtcctcgtttttaacaagaaagtttaaaaagtaaaaaaaaaaaaaaaaaacgtagaagaaagcttatagaataaggatataatgaaaaaatatttttgtatagctgtacaatgtgtttgtgttttaagctaaatgttcctgcaaaagtgtcagaaagttacaaaattatgaagtaaaaaagttatagtgagctaaggttaattattaaagaaaaatatttataacatagattagttaaacctaagtatacaatgtttataaagtctgcattagtgtacagtaatgtcgtaggattcctcattcatgtaccactcacccagagaaactttcagtcctgtaagctccattcatggtaagtgccctgtacaagtgtaccattttttatggtacagttttgcctttatatttatttttactgtaccttttgtatgtttagatatgttaaaatacacaaataccattatgttatagttgcctacagcagggatccccagcccccagtctggggcctgtaaggaacgggaccacacagcaggagatgaacagcagggaagctagctaagcttcacctgtatttatagccacttcccatcactcacattactgcctgagctctgtctcctgtcagataagctgtggcaattgattctcataggattgcgaaccctactgtgaacagcacatatgagggatctgggttgtgagcttcttatgagaatatactacctgataatctgtcactgtctcccatcactcccaggtgggattgtctagttgcaggaaaacaagctcagggctcccactgattctacatcatggtgagttgtataattatttcattatgtattacaatgtaatattaataataataaagtgcacaataaatgtaatacacttgaatcatccccaaaccatccccctacactcccaccctggtctatgggaaaactgtcttccatgaaactggtccctagtgccaaaaaggttgagaaccgctggcctacagtatttagtacagagaaatggtgtacaggtttgtagcctgggagcaataggctataccatttaagtttgtgtaagtacactctatggtgttcatgtaaggaaataatgacatttctcagaacctatttctgccattaagtgatgtattactgtttattatttactcctgacactattattactgaagttaactagagtccccagtggttaatagaggaaagtttatttgtaccatggggcagctgattttacatgtttgatcagattggtctcatgtagaaaggtagtgtagcagccgagcatggtcgctcatgcctgtaatcccaggactttgggaggctgaggtgggcggatcacttgaggtcaggaattcaagaccagcttggccaaacatggtaaaacaccgtctctactaaaaatacaaaaatcagccagacctggtggtgtacgcctgtaatcccagctactcaggaggctgaggcaggagaattccttgaactcaggaagcagaggttgcagtgagctgatgtcgtgccactgcactacagcctgggcaacagagtaatgctccgtctcaaaaaaaataaaaataaggaaaggtagtgcagtgtattgggaacataaatgctaaagtcacgctgcatgggtcaaagaaatcccaactctgcacttgagcaggtcatgtctgtgagttgtttccttatctttaaaatgcagggataggccgggaacggtggcccatgaggctggggcggggggatcccttgaggtcaggagttcgagaccagcctgggcaacatagtcagactgtctctacaaaatattaaaacaaaaattagccatgcctggtggcacatgcctgtattctcatttactcgggaggctgaggtggaaggatcacttgaacccacaagttcgagtctacagtgagctgtgatagtgccactgcactccatcctggatgagagaggcagagactctttctcaaaaaaaaaaaaaaaaaaatgcaggtataaataagtacctacctcatagggttgttagtattaaaaagattaattaatacaaagtgcctaccatagtcactggcacatagtagataatcagtaaatattagcaattaccatttttcatttgaccttcaatagcctttcattattcttagggtaaagaccaatatccttaacaagacccataaagtaaccccattatctggccactacttgttttccacacttttttcttttcctgattcattaagctccttttattttattatctctcatgaaatgcttgttattagatctcagtgttctcttactcatcttcccttggccaactgattgttttctcatgcttcagatttgacttcagaggtaacattcttagccaaatctttcctgatgttcccatcagcccccaacacctccttcccctgcctaagttcaatgctgttgttggctgtgttccttatagaattttgaaaggatgataatacaactgggttatttgttttctttccacaccagagcatattatagacccagaattgttcttagcacataggcaaaggataaatatttcgtgggtgtgtgaggtagtgagtgaattaggagtgaatgaactgatctatgcatacttgggtattacacatattagggtattacaagtacaggtaccaggtaatcctgatacatgagattaggcattttttgttgttcttgaaacttgagaaaataaatgcttcattgtatgcaggtgtacttgagagctacccatacgtagtgtgatgtttggttttgttgattaattgtagttttaaaatatgtttaaattatcttaaacggattagatgtattattctgcttgaaatatgcaaatgtctgaacattgccagtcatttcccattatacctgaggacttacatattgttggcttgagctgctttccaaggctgtagaaggcacagttctgcctgtctgcggtgagtatcagcaggtgatcatcctgaggcagttgcctgtaggaagccactgagatttaggacaagttggaagccaaggcttctgcaagagctttacaagtgtagagttgtttgagggtacagatcacttccattagttctttcgtgatatgcttatcttccttatcttcctgccatctcttatactgtcccattttcttccttatcctttgaatgttttgtcttactttttccctcctcctccagctttgcatacttgaaaacccttctttttcctctccacctccccttaattttgaaaagccaaggaaggattttttttttccttccaaactcttcaagattttttctgggaagccttctctacaactttgacataggcagtgaataaactgattgatattaaacccattcaaagacattaaactcctgtttctctaggagattgaggattggtgtagtttagaaccttatgaactggaaccaataaaacggttcaccaggatgggagtgttttacactttctggatcactgattatccagtacagaaagttcagcatcaccagcactcaacagtagcagctcttccatatcttactctgaaatggaaatggcagtgcctactttaggtattttaataacaataaataaatatatttaataagttctttcctacttcttgaaccaaatagttcttaagaatgaggttgtcattaaaacttcagagatatctgcagtttgtgtttctttgttttttttttttttaaattttgaaaatatccttcaaagatagggagtagtcttttcactttgacagggcatttgacaaccattaatttatgcagcttctgggctcttttaggaagaaatgcagattttagtggttataggagttatctttggttgtatagaaaggtgtaaagatctttctataaggtgttaaaattttccaaagaatagtgtgggttatctttacagcaatttaaaataaattaatatttactgatttatttttaattaaagaacattttcaaaggtggggttaagtagcccaggctggcttgaactctcgagctcaagggatcctcctgtcttagccttccgagtagctgggattacaaacgtgtaccaccatgcctggctttaagagaattttttaaaatataagatatgatgatttgttgactgttttttggcaacagtgtgcacacagtcttcagctacaaagtagttctctatatatgctagcattttgtctgaaattttcttaaaggaatccatttttaaaattgaatgaccctgtaataagcttaacaagtgttcaggatcgcaataaattatatcagttggcaaaactttttacactgcagtgacagtctctttggtaacaaccaaatgtggtgtgaaagatacaataatatatttttagattcaaatttaaattgaaaatatttattaagtataagttttgtaaaactctacaatttaaagattctgttttctaagactacactaatttgtattcaaatgtaagatttccagccatttaggagttatctaaataaattttttcttttattattatactttaagttttagggtacatgtgcacattgtgcaggttagttacatatgtatacatgtgccatgctggtgcgctgcacccactaactcgtcatctagcattagatatatctcccaatgctatccctcccccctccccccaccccacaacagtccccagagtgtgatgttccccttcctgtgtccatgtgatctcattgttcaattcccacctatgagtgagaatgtgcggtgtttggttttttgttcttgtgatagtttactgagaatgatgatttccaatttcatccatgtccctacaaaggacatgaactcatcattttttatggctgcatagtattccatggtgtatatgtgccacattttcttaatccagtctgtcattgttggacatttgggttggttccaagtctttgctattgtgaatagtgacgcaataaacatacatgtgcatgtgtctttatagcagcatgatttatagtcctttgggtatatacccagtaatgggatggctgggtcaaatggtattctagttctagatccctgaggaatcgccacactgacttccacaatggttgaactagtttacagtcccaccaacagtgtaaaagtgttctatttctccacatcctctccagcacctgttgtttcctgactttttaatgattgccattctaactggtgtgagatggtatctcattgtggttttgatttgcatttctctgatggccagtgatgatgagcattttttcatgtgttttttggctgcataaatgtcttcttttgagaagtgtctgttcatatcctttgcccactttttgatgggattgtttgtttttttcttgtaaatttgtttgagttcattgtagattctggatattagccctttgtcagatgagtaggttgcgaagattttctcccattttgtaggttgcctgttcactctgatggtagtttcttttgctgtacagaagctctttattttaattagatcccatttgtcaattttgtcttctgttgccattccttttggtgttttagacatgaagtccttgcccatgcctatgtcctgaatggtattgcctaggttttcttctagggtttttatggttttaggtctgacgtttaaatctttaatccatcttgaattgatttttgtataaggtgtaaggaagggatccagtttcagctttctacatatggctagccagttttcccagcaccgtttattaaatagggaatcctttccccattgcttgtttttctcaggtttgtcaaagatcagatagttgtagatatgcggcgttatttctgagggctctgttctgttccattgatctatatctctgttttggtaccagtaccatgctgttttggttactgtagccttgtagtatagtttgaagtcaggtagcgtgatgcctccagctttgttcttttggcttaggattgacttggcgatgtgggctcttttttggttccatatgaactttaaagtagtttttttccatttctgtgaagaaaggcattggtagcttgatgaggatggcactgaatctgtaaattaccttgggcagtatggccattttcacgatattgattcttcctacccatgagaatggaatgttcttccatttgtttgtatcctcttatttcgttgagcagtggtttgtagttctccttgaagaggtccttcacatcccttggaagttggattcctgggtattttattgtctttgaagcaattgtgaatgggagttctctcatgatttggctctctgtttgtctgttgttggtgtataagaatgcttgtgatttttgtacattgattttgtatcctgagactttgctgaagttgcttatcagcttaaggagattttgggctgagacagtggggttttctagatatacaatcatgtcatctgcaaagagggacaatttgacttcctcttttcctaattgaataccctttatttccttctcctgcctaattgccctggccagaacttccaacaccatgttgaataggagtggtgagagagggcatccctgtcttgtgccagttttcaaagggaatgcttccagtttttgcccattgagtatgatattgtctgtgggtttgtcatagatagctcttattattttgaaatatgtcccatcaatacctaatttgttgagagtttttagcatgaagggttgttgaattttgtcaaaggctttttctgcatctattgagataatcatgtggtttttgtctttggctctgtttatatgctggattacatgtattgatttgcgtatattgaaccagtcttgcatcccagggatgaagcccacttaatcatggtggataagctttttgatgtgctgctggattcgttttgccagtattttattgaggatttttgcatcaatgttcatcaaggatattggtctaatattctcttttttggttgtgtctctgccaggctttggtatcagaatgatgctggactcataaaatgagttagggaggattccctctttttctattgattggaatagtttcagaaggaatggtaccagttcctccttgtacctctggtagaattcggctgtgaatccatctggtcctggactctttttggttggtaagctattgattattgccacaatttcagctcctgttattggtctattcagagattcaacttcttcctggtttagtcttgggagagtgtatgtgttgaggaatttatccatttcttctagattttctagtttatttgcgtagaggtgtttgtagtattctctgatggtagtttgtatttctgttggatcggtggtgatatcccctttatcattttttattgtgtctatttgattcttctctctttttttctttattagtcttactagcggtctatcaattttgttgatcctttcaaaaaaccagctcctggattcattaattttttgaagggttttttgtgtctctatttccttcagttctgctctgattttagttatttcttgccttctgctagcttttgaatgtgtttggtcttgcttttctagttcttttaattgtgatgttagggtgtcaattttggatctttcctgctttctcttgtgggcatttagtgctataaatttctctctacacactgctttgaatgcgtcccagagattctggtatgttgtgtctttgttctcattggtttcaaagaacatctttatttctgccttcatttcgttatgtacccagtagtcattcaggagcaggttgttcagtttccatgtagttgagcggttttgagtgagattcttaatcctgagttctagtttgattgcactgtggtctgagagatagtttgttataatttgtgttcttttacatttgctgaggagagctttacttccaagtatgtggtcaattttggaataggtgtggtgtggtgctgaaaaaaatgtatattctgttgatttggggtggagagttctgtagatgtctattaggtctgcttggtgcagagctgagttcaattcctgggtatccttgttgactttctgtctcgttgatctgtctaatgttgacagtggggtgttaaaatctcccattattaatgtgtgggggtctaagtctctttgtaggtcactcaggacttgctttatgaatctgggtgctcctgtattgggtgcatatatatttaggatagttaactcttcttgttgaattgatccctttaccattatgtaatggccttctttgtcttttttgatctttgttggtttaaagtctgttttatcagagactaggattgcaacccctgcctttttttgttttctatttgcttggtagatcttcctccatccttttattttgagcctatgtgtgtctctgcacgtgagatgggtttcctgaatgcagcacactgatgggtcttgactctttatccaatttgccagtctatgtcttttaattggagcatttagtccatttacatttaaagttaatattgtgatgtgtgaatttgatcctgtcattatgatgttagctggttattttgctcgttagttgatgcagtttcttcctagtctcaatggtctttacattttggcatgattttgcagtggctggtaccggttgttcctttccatgtttagtgcttccttcaggagctcttttagggcaggcctggtggtgacaaaaatctctcagcatttgcttgtttgtaaagtattttatttctccttcacttatgaagcttagtttggctggatatgaaattctgtgttgaacattcttttctttaagaatgttgaatattggcccccactcccttctggcttgtagagtttctgctgagagatcaggtgttagtctgatgggcttccctttgtgggtaacccgacctttctctctggctgcccttaacattttttccttcatttcaactttggtgaatctgacaattatgtgtcttggagttgctcttctcgaggagtatctttgtggcgttctctgtatttcctgaatctgaacgttggcctgccttgttagattggggaagttctcctagataatatcctgcagagtgtttttcaacttggttccattctccgcgtcactttcaggtacaccaatcagatgtagatttggtcttttcacatagtcccatatttcttggaggctttgctcatttctttttattctttttttctctaaacttcccttctcgcttcatttcattcatttcaccttccattgctgataccctttcttccagttgatcgcatcggctcctgaggcttctgcattcttcacgtagttctcgagccttggttttcagctccatcagctcctttaagcacttctttgtattggttattgtagttatacattcttctaaatttttttcaaagttttcaacttctttgtctttggtttgaatgtcctcccgtagctcagagtaatttgatcgtctgaagccttcttctctcaacttgtcaaagtcgttctccgtccagctttgttccgttgctggtgaggaactgcgttcctttggaggaggagaggcgctctgctttttggagtttccagtttttctgttctgttttttccccatctttgtggttttatctccttttggtctttgatgatggtgatgtacagatgggtttttggtgtggatgtcctttctgtttgttagttttccttctaacagacaggaccctcagctgcaggtctgttggagtaccctgccgtgtgaggtgtcagtgtgcccctgctagggggtgcctcccagttaggctgttcgggtgtcaggggtcagggacccacttgaggaggcagtctgcccgttctcagatctccagctgcgtgctgggagaaccactgctctcttcaaagctgtctgacagggacatttaagtctgcagaggttactgctgtctttttgtttgtctgtgccctgcccccagaggtggagcctacagaggcaggcaggcctccttgagctgtgtgggctccacccagttcgagcttcctggctgctttgtttacctaagcaagcctgggcaatggcgggcgcccctcccccagcctcgctgccgccttgcagtttgatctcagactgctgtgctagcaatcagggagactccatgggcgtaggaccctccgagccaggtgtgggatataatctcgtgctgcgctgttttttaagccggtcggaaaagcgcagtatttgggtgggagtgacccgattttccaggtgccatccgtcacccctttctttgactaggaaagggaactcgctgaccccttgcgcttcccgagtgaggcaatgcctcaccctgcttcggctcgcacacggtgcgcgcacccactgatctgcgcccactggcactccctattgagatgaacccggtacctcagatggaaatgcagaaatcacccgtcttctgcgttgctcacgctgggagctgtagaccggagctgttcctattcggccatcttggctcctcccccagtaaattttttctattgatgatagttaatctggtaataatgaaaatgaaaatatctgtgaataaagtggttttcagtaatatttctttgtgtacattctaatcttactttaggagaaatcttccttagggagctacttaaagggactgactgctggacaagtggaaggacgttatgataataataacatggatccccagtggaaaccagggctggttaggaagtgagaagacagagatgctgatgatacactcaggagttccgttacagtacagatgggaagggagagtgcacacacaccccagggtgcttggacaagtagcctgaagcacaaattattttttacatgttttgttttatttgtaatattaattttaactttacgttatatttcctaatatactttagtataaagcaagaattccttttaaatctttggagtaaaatgaatgatccaaagcttgtttaaatggtgacttcaaatacctctttataccaggagataagtttaagcaagtcttaaaaaaatcttaacgtactggagtttttatgaaaactaacacatatgtgatgtgtaaaataagtagaacactgaaaactatttgttaaataccacatcctagatagattttctagaaaaccatggttttcataaaatattttccactttaaaggtaagttatccctgattcacttttatttacaagtacatacagtctttgggattaaccagttcttggatattaataatcatagtaaaaacatctgaggatacttttttttttcctgagacagagtctcactctattgcccaggctggaatgcagtggcccaatctcagctcactgcaacctccagaggatacttattttttaacatgctttgtacccaaggccattacatttagtctgtgaatgtgtttattagctgtaattgagctgcaggacaatttgaaaactagaattgaactcttaaccccaggtttcctctgtgataattataggatgaaaaatagccaagagaaaacaaatatatttatcttcattaataaaaatgcctcacagtactgtttattacttttaaaatatgatattttcattttgcgtatacctacacatacacactgtgtgtatgcatgtatgtatgtatgcatgttttgttgaaattgaattagctgtttaatacccagatttcatgaaacagggatcataaaaactcttagttattttcaagtcataataggacatactctctgccaggcactgttttaatgtttaaaacatataattgcatttaatacttatattaactctgaaaaaaatcaagatccagcatgattaaataacttgcccaaaatcacatagttagtaaatactcaagctggtgaacccaggcagactgactctgacatccatgatcttaactacacatggtatggatgcctacttatttttattaataaaaaggaagcctttgccaggtaaatttgtggaagtttattatcaaaacaatttgtggtgatactgttcatagattctcctggtttgaaagtgaacagccagccctgtgtttgagctctggcatgggagcaggctgcttcccagaagctcacatctgtgctgtaccttttgaagtcatgcttcactgggtctttgatgtgtttcttctgtcttggttcctttcaggtgtctaacttcagatgaatggtaatggttccattcttcagtgataacataatagaactggagttcttttattcttgttgtattggtcataatatgctgcatttttagagacctttattttagttaatcaaggtattgagtttcaagattgatcttttggttattattgtatgtgtttagtctattcaatgacaaattaaatttgaactttaaaaggttttggaaatactgctctattcaaaagaggtgtggtaaatgaattttacttttattttgataagcaataatggggtgaaaagccttacgagccgtttcctctgttctcattgaggtgcagctcacctttgcctccttgattttgggtactcacctcctgctctggtcagtttcctagtgcacttccagttttgtaggaataatgatggatgacctggggctgcagctctaaaccagaaacttctaagacatatgaaatgtaagcataacctttctaagtttagagaaacaaagagtagaatggtggtccccaggggctggggtatggggggaaatgcggagatgttggttaaagggtacgagctttcagttagaagatgagtaagttctagagatctcatgtgcagcatggggaccatagctgataataatgtattgcatacttgaaatttgctaaaagaattgatcttaattgttttcatcacaaaaaaaggttaaaaaagaaactaatgtagccattctattctgaatcatctttgtgtgtgtgtgtgtgtgtgtgtgtgtgtgtgtgaatcttctagttcgactcttcttcctctgtggcttgctctttctgtgcccagctccctctgttacagatacaagaaacagaaactaatcttaaggaaagtgaattagttgagaggattcagagtggctcaaaggaagagttaaacaatgaggccttaggattagagccagttgcctgtttacctgagtgtctagagatcctacaagtgaatgacttacctctggtcagcttctctgctcaagattacattatctaggagaaagtgtgggaggatccaagtcattccccacctgccccatttccatgccagagggatgggtactatgtagaggagcctgaagcagaagaccggagaggggatactggccaggtctcttgctctctgctgtcttctttatgtctgcctgacttccccccgctgccccgctccccgccccagattgtttcacatacaatatgggccataggcagtttagtttcaccagattttgctctgggaaagaaagacttgctgaaaaaagaaataagcagtggctctgaatttcaaatcaatttcatattgatcactggataattgtcagtgaatcatgtttttcactaatcaggagtgcaaattgatgagattaatgaatgtgactgagaagataatagtgggccagaccctggcagccaaatattttcacctgggtccttcttcaaggaaaatccagagagtaaagaggaaaaattaaattagtaatactgctggttcttctggtttagcttcttgtaagcatttctctgctgttatccaatatgaagggagcaaaatagagtatcaacactaaaagatgaaaaaaatcacaaaatgttgattagaattttataaaataaatatatcatagatgaaatatttcgtagaggttttaattatataatttaaagagtaaataatagggtagaaagttatataagggactatttttaaaactacatttgtacttttaaaaatttcggttcaatatcaggcagttgttgaactttaaggcagttcagaataaatggttaggttagaaaagatgagactgacaataaccaaggaaattctttttttttttttttttaagatggagtctcactctgtcgcccaggctggagtgcagtggcgcgatcttggctcactgcaagctctgcctcccgggttcacgccattctcttgcctcagcctcccaagtagctgggactacaggtgcccgccaccacgcccggctaattttttgtatttttagtagagacggggtttcaccatgttagccaggatggtctcgatctcctgaccttgtgagccactcgcctgggcctcccaaagtgctgggattacaggcgtgagccatcgtgcctggccaaccaaggaaattcttaatttaagaatggtcactttcaaaacttgtaaagaaatacctatttctttcagtcacaagctaaagtttttatctcttatttatatcttctgtttaaagtttgcaaaaccagtttttaattgaaattctaagtataagcaaaatattagtatctagtctatttatatgtatcctttaagaagaaatagccagaaagtgttattattttggcataatagagaatcagcctatatagggaaggaatttggaagaattatttcttccttagtaatctgtgttaatatttgttacctcatcaagtatattaaaaggtgtttagaaaatttcagtggaacagaatagtcaaaaccatcctgagcaaaaagaacaaaactggaggaatcacattacctgacttcaagttatgctgcagagctatagtaatcaaaacagcatggcactggcataaaaacagatacatgttaccagtcaaacagaatagagaacccagaagtaaatccatacatctacagtgaactcgtttttgacaggggtgccaagaacacacattggggaaaagccagtctcttcaagaaatggtgctgggaaaactggatatctctatgcagaagaatgaaacaaaattcctatctctgatcatatatatgatggttagttaatactgagggtcaacttgattggattgaaggatacaaggtattgatcctgggtgtgtctgtgagggtattgttaaaggagattaacatttgagtcaatgggctgggaaaggcagacccacccttaatctgggtgggcacaatctaatcaactgccagtgcagctagaatgtaagcaggcagaaaaatgtgaaaagggagactggcctagcctcccagcctgtatctttctcccgtgctggatgcttcctgcccttgaacatcggactccaagttcttcagttttgggactcagactggctctccttgctcctcagcctgcagacaacctattgtgggaccttgtgatcatgtgagttaatacttaatgaactcccctttatatgtatatatgtatctatatatctatatatctatatctatatatccattccattagttctgtccttctagagaaccctaatacagtatacgaacatcaaatcaaaatagattaaagacaaatctgacaccccagactgtgaaactactcaaaaaaaaaaaacgttggggaaactctctaggacataggactaggcaaaaatttcttgagtaatactccacaggcacaggcaaccaaagcaaaaatggacaaatggcattatatcaagttacaaagcttctgtactgtaaaagaaagtcaacaaagtgaagagacaaaccacagaatgggagaaaatacttgtaactacccatctgacaaggaataaataaccagaaaatataaggggctcaaacattgaatgggaaaaaatctgatcaaaatgggcagaaaatctgaagaaacatttctcaaaagacatacaaatggcaaacaggtatataaaaaggtgctagacatcactgatcaacagagcaatgcaaattaaaactacaatgagatataatctcactccagttaaaatggcttttatccaaaaaacaggcagtaacaaatgctgttgaggatgtagagatatgggaatccttgtacactgttcgtgtatgtgtaaattagcacagccactatggaaaacagtgtgaagattcctgacaaaagtaaaaacaggactaccatatgatccagccattccactgctaggtatttacccaaaagaaaggaaatcagtgttatcgaatagatatttgcactcccatgtttattgcagcactgttcacaatagtcaagatttggaagcaaccagaggtgtccattaccagatgaatggataaggaaaatatggtacaaatacacaatggagtactattcagccataaaaaacaatgagactgtcatttgcagcaacataggtggaactggaggacattatgttaaatgaaatgagccaggcagagaaagacaaactttgcatgttcttgttcatttgtgggagctaaaatttaaacaactgaacttgtggagatagagagtagaatgatgtttcatagtggctgacaagggtagtggggtgggattgggagtggcaagtaaggatgggtaaaggctacaaaaatatacagaatgaataagatctatttgatagcagccaacagtaatttattgtacattaaaaaaactaaaagagtataattggattttttgtaacacgaagaaatgataaatgcttaaggtattggttacctcatttaccctgatgtgattattatgtattgagtgcctgcatcaaaatatttcatgtactccataaatgtatacacctaatatgtgcctacaaaaattaaaaattaaaaaaattcaaggatgtaagcataagaaatatccagtttaatacaggtgtagtattggtaagtaaatgcaattctagcctattataatcttaggattttattaggaattagaagaaaaggaagctagatatcagttaagctctcaatctatgaaagccatttgtagagaattaaaattcattgaactgctctatgtaatagttcttcatcattaaacccccaacatgcccaatttacagaactgcaaatgggggataaatggttattttaaggaattaatcactgctttgactttcatggattaggagtgaggtacaattcgttttatattgggggaagacaatcctggtgaacagcaagtgcagatgacccaaggcagcaatgtgcccaatgcgcttgaagaccagcaacgaggccagcatacttggagtggaatgatctaagaggaaactagtaagagggagatcagagaggtaacaggcaccaagatcatgattggtctcatagacagtcttaaggactttagtttttatttttagtgacatggaaagtcattggaatgttttgatcacatggataatatgaactatcattgatgattctggctgctgcatggataggaatgttaggacaaagggtgggagtgagagacctgctagaggctactgaagcggttccaggtgggctagaatggcaggggtggagctgatgagaaaaggtaaaattcagggtgtatttaaaggacaaatagaaaggattttatttagatgtagtagataaatgagagggaggcatcgagaacaattccaaggatttttccagatgacatgatggagttcccattcataaggctgagagggactgagaggtgaagacatgggtgaaaccagaaattcatttttagatacactgagatgtcaattaaaatggatatgcaaggctggagttcaggctggctccagataaaagtttgagttttgttagtatataggttttacctaaagccactaagtggtacaagaccatgtagggagtgaatgtagatagaaagcagtatgaggactgagcccagagcactccaaggtttggaagttggggtaataaatgagcaaaggagaatgagaaaaagcaaggtgtagggaaatcaggagtgcatatgtgtcctggcagccatgtgatgaaagtatttgaaagagaaggaattgataacctcagttaagtcctgtttaaagtttagcaacttggagagtcaacgggtgcccttgacaaaagcaagttggagtgttgagggacgcctgattgggttggtttcagtagaggtcaaggcggggaaacgaagtataggcagcagatttagaccgttctcttgaggaaaaagggagctgagaaatgagtggcagctggaataggaaatgaggtcaagagagttttctttgttgttgtttttgattttgttttttaaaatgaaagtaaatacatcatgggaatgatctagtagagagagaaaagagagaaggggaaactgctgtagtgctgtgcttgagttggccagagaagatgggatctcatgcaaaaacagggacagggggatgggctcaggtaggtacacagcctgtttatccagttagggggaaagcagagagtgcatctggccacagatgcaggttggtaattagatgtgatggggcataataaggtaggaggggttttttggtgtgtgtgtgtgtgtgtgtgtgtgtgttttagtttctgtgggaacaagaagtaaggaagggctaggagagaaggtgcgcttagaaaccaagtgcaaggctagtgctcggtgattttcgtagaccagctgttgcctgtgctaggatctactgtattctctctccatttgttccaaccctttattagaaacctacagtgcttacaggattgcctcagacttgcttttttcccttcctcccagttcttgttgatgccattccttcagcctcccacagcaccatggacatggggctcttgtgtgcagtgggctttgactaaagagttgagacaatggagggagattacaacataatccttcctgacttcatttttttaatccttttcctcatgcttcagagcaggggctcttccttttttgtgccatggatccctttggcagtctagggaaacctaggactgcctcttcaaggtaatttttaaatgaaaaaaaaaaaatgtatagcattgcaaaggaaattaatgaatagaatacagttttcaaaaatataaaaagcacaattgtgctataatgcatgtgtctttatgatgtgttaaacaaactctagtggcaggtagcgtgactgccttattttcaaagtagtaatgtaaacaatctttcaagatatctgtaacagctgagatatggtgtgaaaatgtttgtgatttctgccagtggcaaggtcacaggtattggtaatcgtactgtgatttgttgcctatgttcataaagaaatgctagatcttagttaaaagttcataaaaatagaaaatctttttcccattgaatttctatccttcatcctgtgcatgaatcttttgggcatctgtggtcttcaggttaataacccctgcctcagtggtacctctgagtgtaccgctcttgtccaaggctggatcctactacctgtggtctagcctcctatgccctcctcaccagccccattttcttcgaaacttactccaaacagatatcccagattgttcttgtatcttaaatctctctctccatgggttctttttgtttcctcttggaatatgcttgcatttatgttctttcttccatttcccatgagggcaataaatagacttacttgtgtggctgtggctagtgcaatgactggcatgtgccctgtaaatgtttactacttgtagaaggtaatcactaaacgtttattagataaataaacagatacttctatttccactgggaattctcaggtttttttttcttccaaattagagaatgttacaaatgtcttcctactggaaaggggaaaatgcttataagaattatttagcatcatgcaagcccctttggtaaacacagtagagtctgcaaatttcatcagtcagaccaagatagttaccgtcctcgtagaggggtatgctggatttccaaatgtaagtaattttgataggaaaactgagaatgactctttgtcaaaccagttcattggtttctatgaaagtctggtgacaaaaataattttgagttataacttgctggactttggaattaaaaatatagttaatctctatttaagtgacatgttaagaaatatagttctgatttgaattttgcagtagatactaagtagacacatgtatcttagagtaaaaggataggattcagtgacctattcctaacttccaagaagttagttttggagaaatgttggctattagcattagaacatgtttttatccttgatatgaatttacttttagtctataataattttaaaaattatttactttcctcatagtccagtaactgatattctttgaacacatacctctaatttatacagctattaatcatattttatcttataatatttattattttctgttctttattgaatgatcacttgaaattttatatttatatatttatgcaaacaaaggagtcagttgagatcattataaagcgtataggttaatgcttggcagatagtaaacactatgcaaataaaataaggaaccacaagcatacatatacacaaatttttattctttccaactagatttaaaactgtctgtaaactctacgagtatgaagaccttgtttgtcctgtacatcttcgtacactcagtgcctggcataatgtaggctcatagtgtgttatcagtaagtgtttgttgcatgaatgtaagccactgctcttacattgtgtagattggaaataaagatggtgaaagataagagattattcaggtaacttgtgctaaaggcaaacacattttcccttacctgtttgtattcattgcagttattatttcttacaaatacaaaatgagtgtagttactacaagtggattaggtgtaaggaggtacagtattcagctgggatacactagcatggctctcttggttctttatggccagcctccattcttcttagatgtgtacaggccatatccattaaacaacattttgaatataatctgcggttttaagtgaatatttggaagaaaagttatttaaactgaatagataggaaaaaatatatgtatacacacatatggacattactatgtctaattttgaggaatgatagaaattttagcatataattaaccagtcatttatagattaaagaatctaaattgataagctatattttaatattactaaaatatgatacttttacaattaagatgttgctttttctagttccaaatggttgtcatggtaacaaaagtacattattggttttcttacatttatgtccttgcccattcattatgggatttagctgttttacagggtcgtgaaaattaatcagtagcattttcttcttgtaatggcaagcacccacattaaaattattgcattccatgtaacttatcttttgatatcactgtcttatttctcctccttaaaaaaaagccagagcaactactagactatatataaagtaattttatacttgccaattgatcttcccttgggagctactgtagtttttataaatagcttgctgacttcgaagaaacatatttctgttcttaggaactcatctggaaagaacatttctttgggggatatggagaccatgtgtggaattccagctacaagaaaaattctgggatttagacaaagaaatattaggtggtttaaaattgaaagtctttttgtgaaaaattggtttgctcttaatagccatattttatgttcttagaacctaatatattgtggattcgtggtccccagcctggagtttccagactccggggacctgcaaacccagattggtatcactgattacattatcttggtcagagtactaattcgaaattgtatgtgtttattaaaaatgagcaaatgtttattacttaaaaaagcaactcatttatttactaaatttttcataacgtggagttcatgaagtaaaaatgaaaagtttctttgggaaagactcatgtcagtttgaagcttgacctttatgtgtgattgctacctctagagattttaatttattgaaatactgtgtccaattgtaaagctaagaatacaaaccacttaagtgaattttactttacagtgaatatcaaagattgaactactttttatcccaaattaaaatttttgatcaaagatgcaggtggttttatggtagttcataaaatatattctctccatgaggataatatgtatggaggctgtatcttatagatagtattatctttaatgtaatgaatgatactgaattcataaataaggtaacttttattgtttttggtttaagagatattcaaaataagctttgttgttttcaaggctagtgttatttttgtttctttttaaaatttatttagggggaggggaggaagaggaggtcatggtcagactagcagcacatgccgccatcagacttcagacactctctgaaggtgtttcacacctcaccctccatttctccaaatcactgcaaaagcactaaacctgaagattgaattctgtatgaattcaacatttggaaatttaaaaaaaaacaaatgaataattatagaattgctccaattttcagtccagtttgatttttaagaaaactttacttatctcattcttaaatggcttagaaatgttgatcagaaatttctcagtcattccagtgattttacagcctttttcttcaggatggtgatcagagtacttaacctaccttcctcttattgcaaattaaacttatttcctgttcaatctgtagttgaaggaaagtaactgtttgaattatttgcatttcccctgggctatcttcatatatttgaggactactgtgaagctctctattccttctagcaagccccaagatgcctcatctattgaataaggcctttcgtatcctgaaatgataaaaaatggacatgatgctctactgtaattgtaccctaatataaaggagagattatatgaaaataattttataaaaacatttaagaagtgcattttgaaaaataatgaatttgaatatggaaatatgtggacatgactataataagaataatgaagtagatagattcttgtacttatatgtagcaccactatgaacagcatatttacaaatgaaggctgaaaaagttttgttgtatcagtgactcagaaacaacaaggggtattgagattgtggatgcaagtttttgataacggtgacaaggctctgaacaacacaaatctcttgatttatgtagttgttgccttcttggaattcagtatgtatttaaaatctttgataaatactatgcatttatatgtaaaatgcagtaaggttctagactgagataattaaacatatttttcactctcatgagtccagccattcattcaagagtcttgagggacccatgaaaactcttcgtttgggacagtctcctgtattgcagtaaacctagcaagcctattcttggcccatgaaaagaaagacatgctccctagtcattgtgcaagccaaaaatgcgataacttattttccaaaaagctactctttatgtgatccccttgagaacctctgctctagggttgtaagcttttaaacttgagggctattttctaaagcatcagtatttttcttttttccttctttgtagtctattcaattatcatctcttatactgaaatataatcaataaggacaaaggattcacattcttttattccagaatatgcctaacatatattggatggcaccaaccataataatctaggtgcaaaaaaattgtaaacaaattatcagttctaacaaaccactgtggatgattattaaaaagatcctttagtcttctttaaaggatccttctttaaaggaattctggttcatattgagattattttattttataatatgtggggggataagaacaccaaacatttatagagcacttatctaacagttattatgttacttgccttctctctcattttaagtctcataaccatctgatgaagcaagcattattaatatcttcatttgatagaaaagaaatcagagccatagtgaggttaattatcttgctcaaggtcacacagctattaaatagtagagcctggacttaaactcaggtttctcggactctacagcatttgctctaaattgcactggtgtgccgatgactcttttcagatgtttttcatcactatgaaactatgtctaacatagaccttcagaaaagctcttcccatctcttttaaaataacataacatgtacgtaacaaaaatacgggataattaaaactctgaagacagaggatagtgcttattttttgttaatcaccttcaacttcaactaaagggaaagcctgtttctaagtcttctggttccagttaccactgaagaaaaggaatgtgcattgctgccactggtgatatttgtgacttctagataaacagtgccttctagtctcctgtgtattattcttttcagcattaataaatttatttaaaataaagttatttgagttaatcaaattcttgtgcttggaagtgaaataatcagattttaacttacatttaaattttagagaggtctgaattgattatttaaatctcagtaatttattgaaacatcactgtgtgccccataaatgtgtacagttagtatttgtcaaatgaaaataaaataaaacttcgaataactttgcagttgttaacacagcctcttccagttttctgctaaaagaccagtgaaggcccagggggaatacaacaacaaaaaagactgacaattgctagaaattttgatgcatttctttcacctataaggagctggcctggggaaaaaaacagattgtctcatgaaaaagaaaacccagctatccaaagtaagaaatgtagaggtagtttttgttgttgttgtttttttgataagatctgctgcttgctcagagacccatgatcttttaacagctagaaaactgggcagccctccatctgctgcaggggtgccgtttttctgaggatgctgtagcattatcatcactgatgccgcctcctgacctcctgttccatatgtctctattctcttcttatgtctttctccagccagctagcagcgtaagtcatagaaaacagcaagaacctgggagagggggagcagctgactactgcatcctgaaaggagggggtttcctcctgtaaagggctcaaggtggggacagagaactcaatggtaggcattttagttttcaagtgctccttttgctgattaacaatatgtaacaagaaggtcctgctgcagtccagaagaccagctttaaatgaatgtatcacagtcactgagaactgggcttctaactcttcatatctttctacattcttgctatagcattgaaaagggatgtctataatcagctaagggcataatgggcaggccaaactgttttgtggtagatgccgtcatcattacagaaaggcagtagaaaggtggcaaacaacttgggacctaatttagaaaactatgccaggtgagggcctatcatcctgaagatgcaagaggaaagcacattttttgaaatatttgtaatgactagaacacttagaaaacagtttagcataacagaaggtagaagatatgatatttatgaaacttcagcaaagagctctaaggagaacagactgcttctctaaaggtttgggaagattgcaaggaacactaaaacagggttggacacaaatctgcagagggggcaagaaagaattcatgattttaaaaactgaagtaaagagtatgcttcaggaactctttcagatttcaagagaaggatcaagaaatgaaaagaatgagataaaaaagtatggaggagagagaactaaaatccagtctgagaaagataaatgcaaatgtctgataaaatatgaaaaaaaggccttactcttatgcaaataaatgcaaattaaaataaattaacaaatatttaagaaaatgtgccaaattaacaaatatttaagcaaatgacaacatacttttgatacaagttcagtgaaaaggtgctatgtgaaatatgtagccgtttaggcagttttgtaccattttctgtagaaggttagcactttatcttcaatgaatagttacacacatatagtaagatctatataaaatgacaacagaatttggaaaaaatctagtggactataagatatttagatgtaataatttatggccttaaaatcatggtttaaaaaattttagtttacaaaattttatgtaagaatatccttccgatataatgtactttatacatttcccaagctagaagctaacagatgaacaaggagaataaatatattaagtaggaaataaatttgggaagctgcttgctacccagatttattatgacttacttcccaggtcatttattattacttgaaaaagcataataagtgttagctcattataggctctgagatgtcctcaaaaagacatctgttaaatttgcttaaacctattttaaacaatacaacactttttttagtggaatagatactaatatctcccagaatgttctttaaatatcagtttagaaaacaatgtgttaatgacaaaaatatatttttgaaaaacatatgtttatgtaaaatggaagtaaatacaccagattatttactttttatttttatttttttatttttttgagacggagtctcgctctgtcgcccaggctggagtgcagtggcgcaatcttggctcactgcaagctctgcctgcagggttcacgccattctcctgcctcagtctcccgagtagctgggactacaggtgcccaccaccacgcctggctaatttttttttttgtatttttagtagagacagggtttcaccatgttagccaggatggtctcgatctcctgacctcgtgatctgccctcttcggcctcccaaaatgctgggattacaggcgtgagccaccgtgcctggccaatacaccaaataatttaaaatgatcactgaatagaattgttttatgcttgtatgtaactcctgaattttcctcaacaagaatttcaatagaaatgcaatgcttttgttataaaaatatatagcaagtaaaaaatatagaaaataaatttggctataaaacttagtcattagaagacataaaatggaaccatccttctgatggaattcatgccataatttttttctattatagaattttggattaggcatttattttaagatgtggcaagagatattttgaccaaatttttagtgatatacatgagttagtttctcctgaactgtaaattagttcaaatagaccaaaaaatggaaagagttatcttgagtctaagaagagtgaaaatagttgttttctgttcattttgttttaatcaaagtttgaatacaactcttgttatttgtattaactccaatcaaatgaaaaatggggcaggtaggctagttgctgttgatggttgaagggtatgggtgtgtgcatgtgtatgtgtgtttaaactttgtaacttctacttcatttttaatacatcaaagtgaaagacactgtaatcctatctcctcagtctttcaccaccccttccaaatccacttaaattcttctaattattcacagatgagattaagtccaaaggaatttttgtttacattgttgttctattttctctttttctttagagatgactacctttgtttttgcaattatgttaatagataagcatgtcaacataatttataattgccttaattattttattaatgcaagacttttacactatcagaggcagatctggaagtgatttagatgcttgccttttttgaagaatttgaactgttgtcccatcagactgtctagagccaactaaattgggagatgagagaactgagcttcaagaggccactctttatgttagaatgggtagtattcactgtaagttgtaaagtgaagttgaaagaaatgcacgttctagttaataattttttaaaaaaagaattactttttaacaggattttaaaaaaacttccgtcttttaaattttaaaacgctttccatcttttcaattatccaagttaatttttcatgacttaaactgaagattacagcacgcaatacccttcccacgagggaggcttttaatagtggagtcaagaaaccagttttattttgtttactatagtgtgtataaggggaatatagtattcccccaatccccacattaatttactagttaagacattatttcagaagatcttgtgcatatgtatttttagaataaagatagaaagcactggaatccttatatggtcaactcctgcatttttgatttgttgaagactttgatcagtgtagggtggcagttttgtggccagatcttaaaccaggtagcataaagatgatgaatcttaaaatactctgtgacaagacttaaaaaaaaagagttactatgcagtgataatgaagtatttaatatttgagaaatccatgaaaatagcaaaatatttttgtaatattttggctcagactgtgaggagattacttaattgcatataaattactaaagggtggcatggttaaaatttcaaaagtaaaatatttacattttatccagttaaaaaaaatcttccttttcctgggtctccaggagcccagttaatgatttgcattgtgatcagcatcgttttgcagattttcatcagtgacttattaaaacttgtccatttgattagaaattctccttcctcagtgaaactgtcctactggagtaagagaagcagaattttctgcccccattctctcttcacagattattccttaacgcgtccctaaactgggtggaattactacagatgatgtgagggattgtaagttgaaagaatttaacaaattaatgatactgttattttattttatatagagattctttcactaatgggaaaacctttggtcctcctttaggtaggtctgaaaattggatgatatatgctacaaacttgaagagcaaaaaccgagtatttagaagcacttagagatccagcaacatcagtaagatgttgagtaaatactgttttcaaaatagtcatcagatgttacagaatcatgtatacgtaatcttacagaagacatttcttgatgataaggattgcttcttactgaattttttattcctacatctggaaaagcagtttttatgtaataaggttgcttaaatatccatcaagaaaatttttaaaaactgaggctgaaggattcaatttatggactttgattgaacctgtttgtaactattggtctctatagccaggcatattctgttttttaagattgtctatttataaatattaaacttttattttttagtttttgtaggagtttgcttcccctgtcaataagcattgagattgtagtatagtgaatactgttttataatgttaaaacctgttttggagcttggcagagctgagtcttcttatgtagacatttctggtgccagtgcatcctacaagaggttcttggacaaaaccttttatatgtcttttatatgttggcttttatatgtctttctctttcacgagatcccatcccattccattttctttcattttattctgtattccttcatatatgtgtatatctcttttgcctgggtcttgagagttatagtcttgaggtagtatagtgctgtgattaagataaaagttggcttttatatgtctttctctttcacgagatcccatcccattccattttctttcattttattctgtattccttcatatatgtgtctatctcttttgcctgggtcttgagagttatagtcttgaggtagtatagtgctgtgattaagataaaggatgctgctgctaaggtggcttcaaatcccagtcctgctgcttgctagctgggtgactgagggtaagttatttaatccctctgtgtctcagttttctgatgtgcaaaattggggtgataatatcacttgcttacctctcacaggtgttatgaggattaaattgataatacatgtaaagtacttaggacaacgtgtggtgcatatctacattcattgtcaagtatttgaaggctgattagaatttgctattactggtttcatcagagagtattttctgactcagtatgatgtttgtatttggccaagaatggagtcttcctttggtgtattccatccatcctctgcaagattctagaatacctgtgctcagaccctgtgctcagctacctaaatactattagtgaagatccaggtcaagcctcctatgttatctttctcttatagtgagagcaaagacatggtccctgaacacacaaaacatatacatatatgaccaaactagattgcaaacttcttgaggttagagaaattaggctttatgatattttttatcatagaactgagaaaaaagagattacccaataaacacatggtgattttaaaattatggttatagctaatccattttccaaaagagaaatttagaaatgatgatataggtcagagtagattgatggtattttcagtttcagttgtgcatttagttaatagaatggaagtaatcagaggttgttttacattgtgtattctctgaactttgtttgaatgaaatattaccatcccaagtctgagttttattcaggtggtgaataatttgtatttactgcttatttgactttagttgtaaggaaactatagatttcagtagaaataataatagtagcagctaacagtacatagtgcttactatatgccacacagtacctgtcaaccaacacctaatcttgactttgaaaagcctttaaaaaaaaaaaagacacaatgacttgggagattccaaattattactgtttttttttgttgtttttttgagatggagtcttgctgtgtcacccaggctggagtacagtggcacggtcttggctcactgcagtcgcatctcccaggttaaagcgattctcctgcctcagcctcctgagtagctggcactacaggcatgcgccaccatgcccggctaattttttgtatttttagcagaggcggggtttcaccatgttggccaggctagtctcgaactcctgacctcaggtgagccacctgcttccacctcccaaagtgctgggattacaggcatgagccactgcacccagccccaaatttaagtataaattttggaaacatatttcttaatgaaaaattttcagtttaaaaggtttgtgtttaggccaggcatggtggctcatgcctgtaatcctagcactttgggaggccagaggaggtggatcacctgaggtcaggagttcgagaccagcctggtcaacatgataaaacaccgtctccaataaaaatataagaaaattagctgggccgggcgtggtggctcatgcctgtaatcccagcactttggcaggccgagacgggtggatcatgaggtcaggagatcgagaccatcctggctaacacggtgaaaccccgtctctactaaaaatacaaaaaattagccgggcgtggttgcgggcacctgtagtcccagctactcaggaggctgaggcaggagaatggcgtcaacccgggaggtggagcttgcagtgagccgagatcgcgcctctgcactccagcctgggggacagagcgagactccgtctcaaaaaaaaaaaaaaaaaaaaaaatttagctgggcatggtggtgggcgcctgtaatcccaggtacttgagaggctgaggcggaagaatcgcttgacctggaggcagaggttgcagtgagccgagatcgcgccactgcactccagcctgggcaacaagagtgagactcgtctcaaaaaaaaggtttgtgtttaattgaatgctcatggacataaggaagggaacaagagacaccggggcctacttgatggtggagggcaggaggagtgtgagggtcaaaaaactacctatgcttattacctgggtgatgaaataaaacgtacaccaaaccctacgacacacaatttatctatagaacaaacctgcacgtgtacccctgaaactaaaataaaagttaaaaggaagtttgtgtgtaatagaaatagtgcttctggccatttcaccagcctggaaatggttcttgagtatatcagtcgagggtagtcaccaccagaggtaaagtgggacagtgaacactgctcttgccaacagagtggtgaataacagtgctagcattttcttttcttccaggctgttcaaagtgaaaggtgaagaaaatagccctctgtatttagtttgcagttgctatttggtttctaatttaggttgtgtattttcctctaatgtttcattttgacataatatattttaaaatggacttttcttgtggacacaattttatgatatgatttttcttaagttctaggcggcaatgtggctgcgttttatttacttgaatcgtatgtgatgggaaccagactcaaacttatttcagaaatagtgttaattatacaaatgaaagaggcagatatcttttggttcatctacacatttcagagttgctcctgtggtgcattcccgaaaccgtatctgaataagcacaacatcttctaatgccagtagatattttatacttgcctgttggaagttacagttcattaaatgactacacaataatgtgtgattgtcagaacagcattcagtacacaggtagctagtatctggtaatggggttaaaagtaatggaagattccaatagacatgatgaattttaaattgttcctttattatacattttagctgatgtactattatttataaaacaaaagaaaacaaaaagtggtctattaggttatgtctccagatagcagagttttgagtgggaaaaatcaagggatatatacggtaaagaaacagtggtctctggcttgagcttcgaccagtataattactgggattcagtcttcagaagacccttcgtctgtgccagaaccccagaatggattttaacctgtcccgtttcagattgtcttcatggtgggtgggagataatggtagcaggagagagatgtcagcataaagattaggattaaaaaaacgccaagctccaattactaaaaagttgacatcaagatagtatttagaagattctttaaggagggaaaggcggaggtgtagaacaaggaaggattgggaagtcattttggatattagagtgacctgaattccatatgaaggaaatgtttgttagctgctgtttctaagctgtatagttctgtattttttaatgaatagatcttttgataagggccaagtacttattaaaaaacaaattgtatgtaagttgataatttcttagaatttcttgtctgtagattagggattcaacttggtgatatgaggtcattgcagttgaaaaagaggcacaagcttaaggtaaaaacttttaatacccaatacaacgtaaatgttatgtaaatagttatactatattgcttagggaataatgacaaggaaaaaaagtctgtacatgttcagcgcagacacagccattcctttaaaaaaaattttcaatctgttgttggtaaaacccatagttacagagggctaacagtatgtatttttgcattacacatgaaaaaacattttaatagtttagtggttaaatggaggtttgctttataatttagaaatgatacacctgaatgcaatgatatatagatttttaataatcttcaagtttttctttctttctttttttttttctgagatggagtctcactctgtcacccaggctgaagtgccatggtgtgatctcggctcactgcaacctccacctcctgggttcaagcaattctcctgcctcagcctcccgagtagctgggactacaggcatgtgccaccgtgcctgactaattttgtattttcagtagagatggagttacactgtgttggccaggctggtctcgaactgccaaccttgcggtctgcccactttggcctcccaaataatcttcaagttttatggatatattttaggttaattcagaaaaaataaatgtatactttaatctattaaatataagaatatagaacatagttctaaacacaaacctgttcatgctgggtttttttttttaatttttttgagacggagtctcgctctgtcacccgggctggagtacagtggttccatatcagctcactgcaacctccacctcccaggttcaagcaattgtcctgcctcagcctcccgagtagctggaattacaggcgctcgccgccacccctggctaattttttttaatttttagtagagatggggtttcactatattggccaggctggtcttgaactcctgatctcgtgatccacctgcctcagcctcccaaagtgctgggattacaggcgtgagccactgctcccagctgctgttttctactttaaaaatccttcaatggttcccattgcctctgggtgaaatccaacatttctagcaacgaatcctcattttcagtttttatttgctaagaggaaagaacaacaacatgcattacataacagactcattgaaaaacatttttttttcgagatgatggtggcataggatagtggtcttatcaaatgtgttaagtggatttttctgatttgtgtcaggagttttcagatgcataccataattttagagtatactacttactgagtaccccccaagacaaacaaacaagtacatgtcataaagtctatgcttatgcctaaacctttggcatagaggggaatgcatggattgtttgacaactttgtgtattggtgacactataaattcatagtccctagctttctaggtgctgattgttgctgagtaaaaattctgtttatcccatatgttatctttctcattcctacttaggagttatgtcaccatccatcttctcaagctctctccatcaatatattccaatcctttttcagaggattaacatttctcttctctgaccaaggaaatagaggtcatcggagacatgcaccagtttctgccttgtgtcaacatccacttgtatttccatatattgatactgcctttcttcctttcacagtgtaaggatcttcccccctccaccctgaaacaagactcttttccagtcatattatctgtcttctctctttcttctctttttcatccctgctaaactcctcctttagcatctcttttcccgtccaaaatccttccctggtctagtgtcagcctctacctgctgctgtaactccctttggaaaaaggctgtctgtgttccttaccaccaattcattgcttttttgtttttgtttgtatgtttgtttttgagtcggagtctcgctgtgtcgccaggctggagtgcagtggcatgatctcggcttactgcaacctccgactccctggttcaagcgattctcctgcttcagcctcccaagtagctggattacaggcatgcgccaccatgcctggctaatttttgtgtttttagtagagatggggtttcaccatgttggccaggatggtctcgatctcctcacctcatgatccgcccactttggcctcccaaagtgctgggattacaggcgtgagccactgtgtccagcctcattcattgtttatttcactatagtctgtagctggaaatgctttcaccaagtcattgatgaccagtgatttgtcagatccatggacacttgttttaggccctggcctatctcctgtatccagtagggccccatattgagcacacaataatattagttaaatgaataacatttttcacttatcttctcttatttatatgactttcccttctctggggtcttttactggctcttacctgcgtcttaaacttttgtgttctaaaggttccaagaaaccactgtctctcattctagcatggctaacccttctctggatagataccccattctcaagcatgcctccagaagatgcatatatagcaagtctttcaccttaagtcttgacccttattaaaaggggtcaacatgtttgtgtgttccatagacacctcaaactcaatatatccaattttacactcattttcaatctcatcaagcttggttctttcagtttattaccgataagaggcatctttctgagtgatgtcaccagatacacagatgcttaaactagaaatctagcaatagatcattaattcttgttacatctactgtcttaattctgagttcttctactcctctttattcctcctacatcttagggcctcagttaataccatctcagttttcaccttggaatagccttagtttagtttccctgcctgtctctctaattttgattctctctgttttgtgagctttcttctctttttcacttcatttcacctaaagaaaacattttagagtttccctgggacgtatggaactttttacaatttctggagcaaattgaaaatactggtctttgaacccttgggaaaacataagttttcataaccttcaaaatatgattgacacattgcccagtaaatgtttattcttgtgtaattactgcattaagattagttttagttgcatattaagatcaccgtttctttttttttggagacagagtctcacttccatcacccacccaggctggaatgcagtggtgcagtcacaattcactcagccccctgggccccaggtgattctcctgcctcagcctcccaagtacatgggactataggcatgtgccaccgtgcctgtgccccgctaattttttttttttttttgtattttcagtagagatggggtttcaccatgttgcccagtctaatctagaagttttgggctcaagcagttctcttgcctcagcctcccaaagtgctgggattacaggtgcgagccaccatacccagccttacttcttctttttttttcttttgagacggggtctcactcagtcacccagacaggagtgcagtggggtgatcttagttcacctctacctctgcctcccaggctcaagtgattctcctgcctcagcctcccaggtagctgagattacaggtgtgcaccactaccacccagctaatttttgtatttttttagtagagacgggatttcaccatattgacaggctggtcttgaactcctgacctcaaatggtccacccacctcggcctcccaaagtgctgagattacagacatgaacctgttacagaggtattacgtgtctgaatgccttacttttttattcagcaaaaaagggggctccccactgtcattggagctgagtgtggggagaccaaatgaaatcctgtttccttggaagggaccaataagtgtcctttgtttccagtgttgaacgatgagcaggtttggacagttggatctgagggaagggccatcccaggcaaagggaaggcaaatgccagtgcttgaggctgtgaacaacagagtgaaaatattcctagatcatgaaaataagtgtttgaatttagcataatgcatttgacttattattaatcaaaggtgttgcacaggatgagtatttgtgtttacctagtcactttaaaacatatatttcacctcaagtattcccagtttggtagactacagcatgaaggcttgaatgttgtagcttaatttcttctgtaactgctagtttcttctatggcactgcttatttgcatggtagtgtgtgtctccatagagtcctcattcaacagttaaatgttagagtgctctgaggacagggcttaaacagtcaaaaactatttcttaaatttctctagaacctcttttttaaaattaaactccatgatttgtttgaattaaattttactatcaaacacacacacacacacacacacacacacacacacacacacacacacactttgctttaaaggaagaataataatttgtatttgtcagataatttctgatttttgttttactctttctgaaatgtcaaagacaaaacttccgtgaggtttttagaatctagaatcatcattcatatattgtatgaaaacaattttacactttacacttctttttctttaaacctttttccgttattttactaagcaccagaagaaagtcagatatttcctgtgatgctaaaatttcttccagatcacatgctgaaataccttttttctttgagggttctcttaaatgatcaaatgtagtctcttaagtgtatatggccagctctttcatctgagctactttgtctaaatgtttatgctattcagataacatgtatcttcaatattcagctttgcatatgggctatacttcatcccaatagtattcctttttcttcttttaggtttgactgaattagaggtatgttccatccatgttaaatgggttcaaaaggcctacttgaatttgaaatactcctgttcattataaaataaaatgtgactgtgtttctaagtatgcatagtttttataatctgtaacattttaatttgttatttttcctgagatcatgtaagcatttcttttaaaaatttagtttttataaaatggctcatgttttatgtaagtttggcccttattttttctaaagatgcaaagcttaatggttgtaaggaatagaggcaccactttcccccttgaggcctggtcaatatttgaatacttgtgcacagcataacaagtatcttttagactgaatacattaatagtagtactttcaagggatgtttagcaaactttatgggcaatagggttgaaaatctgtgtagtcagtagatttacaaagttatattagagaagaagttgcaaagaaaggttttaaggaaaatttatctttatgttctaaatggccttttaaaattctatttttataaactctgatcagtcttaactaaattttgcgtttaaacttttggataaaagtcatgttacaggggttcttgcaatgtgaacttcatgccgtatttgggcttgtttttatgattttcttgcactaaacttggaatgcactcttgaagaataggtttttggctctcaaggaccttcgtagtcatacactagctcttaatcactgtgtctgtggagtgtcttgctggttggagctctcagtggattgacttccctttctctctacttcctgccaagagagagagagagttttaccacttgtggtagagaacatctttacttggttatgctatttgccatgtgatggttatggagtttctgctataaaagaaactgtcagctctaagttatcagtgcaagttttggattaatagcatctttagcttttatttccctcagtcctcttgctcatttcattatgccttagagaatggagaattgggaataataataaatgatttagtgttctactgtttaatttgacttttcttgagtatgttagacttaacctgaaagttttggttgtgatgggtttacattctctgtgggtttggtagtcttcagcaaaaattagcctctattagcacaatgaattgataattgcccagcatttcatcttgcgttggattctgacttcactctggaagcaaagatgttacaaagaagggtaccctgcctcagagtttggagtttcccacattaacgttggaaggtgtcttttggtaggctcttaaacaattatggaactgtggaaatagccttaggtgaggagctgaacatcccaagttctcaagtgcactctgtttattgaattacagacacttatctgtaaatgatgatgatttttttggcgggggggcggggtaagaggtactttgttaaatgctttgtgtgcattatgttatttaattcatgtagtaaattggaggcaggcattatcccaattttacagatgagaaaaccaggggttagagaagttaagcagcttgcccgatgtcacacagccagtaaacataaagctagaattcatacccaaggactgcctgactccaagacctgtttctttgctgctctgcattctgctatatgtaaagtaccgtgtgcttattatgaggattaaataagctaatgcgtacatcctttgtaaagtaagatattagtcttggtatggtaaaaatatggacatgtttggaacatggaactgttactaatcttttctgctattttaaggcttcacatgcatttcataattttatatataagtattttacaccttcaagattgttaatatgttgtgaatgtcatgtttcttgatttatgaagtactcatgttattctttaaaaaccctttctaagaaggaaggaaatctatatcccctccccccacatattccatggatttttgttttgaaaagaaaaaacttaattttacatcagaatctttagaattttttggactctagaatttaataattagttatattgttcacttacagtttcatactagagaataagatcttcaatattccattattttaaaagataatacaaggtaaacacatacagaaaaggtttgattgctccagtaaggatactgaatagtcaaacaattttcaacaacttagtttactacctatatatacaagctattttgagtgttgatgcattactgaaatactttaaggccttccttagtttgtatgcattgctgaaataccccaaggtttgattctagaatgctcgaaaaattttaaattgcaaaaggaaaacaaatgaatgcttactcatgttgtaacacttttctgtaatttacctcaatttctaaggtcgtaccttttattcaggttaggaataggttttaagtactcttgattccaagtaatttgtttaattgtcttaatgctatctttataatcattttaagctgtggtgctcttgtgagcgagtgcccaggagctggaaaattgacatccaggcagtgaggtctgctttctcttaccggcaccctggcattctctgtgacctcacaaggcacttttaaaatcttttagcttctatagctttgaaggcaaagccctagagtatggcttggaaattcagaaaaaaatgataatttaaataaagataaatgtaaatatttgtagacaaagctttcaagtgcaaactggttttaaataccctctaaacatataaaaatattttcaaagtcactttttaaacccagaagcaatagagtataaaagcccctatcaatagcacgtttagtgatgattgcaagtatttgtttgaaatataaattttgaaattctaacttttgattaaagtagaagtatgaatttttaaaccttttcagatgagaaattagaaattttgtcttcatattttataagaattgatgaatctgctgggtttttgtgatatttaagatttttcttttattatcaaagaaaaatgctggatgccagtggagcatgcctgtagtcccagctactttggaggctgaggtgggaggatcgcttgagcctgtgccactgcacgccagcctgggtgactgagctagtccctgtctcaaaaataaacaataaccaatttcaagtgtttaatatatccccatgtaaatattcagcagtaaaagatgattatgttttgcaattacttacataatgctttctgtgagtataaaactgaactttagatgtgaaagttgtacgaggcagtttctgcacctaagaagttttagagtgaagagatttcagtttgatacaatttaaaggtaatgtaatcatactgggtttgaaggttttctaggatatgtctttatgggaaacccaactgattcagctgcctgtagggcccccaagtacaacttcacatttacctgatgtgctgtactatatctagaaataatctatatgatttttttttttggccataagccagacttcctgggtcagcattgagcaaaacttgtaacaggtgtctgactacttcctctcacctccggtccatatggccagagctttacttgttctgtcacttcggatactctcccttaagtactgaccaccttactgaatgaccctcaatttgcctttctagttttatttgagttactcttctattaggtggttgtttacctgaatttttgctttttttccttcatcgtttggagatgactttttgcagatcgaatcttgtacccggatttcccatctctatttctgctttgacaaatcttacccatacttcaaggctatgaattctttttttttttttttgagacagagtttcgctctgtcaccaggctggaatgcagtggcgcgatctcggctcactgcaacttctgcctcctgggttcaagcgattcccctgccacagcctcccaagtagctgggactacaggcgtgcgccaccatgcccagctaatattttgtatttctttagtagagatggggtttcaccatgttggccaagatggtctcgatctcctgaccttgtgatctgcccacctcgccctcccaaagtgctgggattacaggcgtgagctgccgtgcccggcccgaccatgaattcttacttctatcttcctgtgtgttatgtgtcttattgcgtttaaaaaaattaatgtaaaatacatgtaacataaaatttactatcttaaccatttttaagtgcagttcagctgtgttaagtatattcacgttattgtgcaacagatttccagaactttttcatcttggagacctgaaactctggattaagccacaagccccattttcttttcttcacgtccctggcagccaccattctaccttctttctgtttgtttgagcttgagtactttagatacctcatgtaagttgaatcatacagtgtttgtcttgtagtgactggcttattttacttagcatgatgtcttcaaggttcatccatcttgtagcatgtgacaggatttccttcttaaggctaaatattttatatatatatgtgtgtatatatatgtgtatgtgtgtgtatatatatacataccacattttgttttatccattcatctttcagtggacatttgggttgttttcagcttttgactattgtgaataatactgcagtgaacatgggtgtgcaaatatctctttgagattctgctttcaattctttggattatatatccaacagtggaattgctgggtcatatagtaattctgtttttagaatggaaagtgttgctatagtcttatttttgaccttaatttgactaccacagccatactgctctcagtcttctcctttaagcttgtgtctctttttgtttatgttttggaaaatatggaaatcatggagcatatgtaaatatagaaaaatatattttatatcaattaaaatctaattgtgatttatacattttagtagaagagggtattggtgatgtgaatactaacaaaaggctgtagaaatctgattatcttttgctttctattttttagtaagtaaacttgattagaaaaatgttatagatcaaagtcagtttatatatttactcttaaaatctgtggctattggccgggtgcggtggctcctgcctgtctgtaatcccaggactttgggaggccgaggcgggtagatcacttgaggtcaggagttcgagaccagcctgaccaatatggtgaaacgccgtctctactaaaaatacaaaaaattagccgggcgtggtggcagacgcctgtagtcccagctactctggaggctgaggcaggagaatggcgtgaacccgggaggcagagcttgcagtgagccgagatcgcgccactgtagtccagcctgggcaacagagcgagacaccgtctcaaaaaaaataataataaataaatctgtggccagcatttaagtatcaaaatccttgcactaagtaacatccccaaactgtaagtctagtaagacttagtatttgcttctttttggaaagataccagagaaacatcatatggtgtctgtaattctattatatggaatattatattttctcttattcacaagctaggagctcaaacattagaactttgaggtgctatagtaaaaagttagaactttgttaaaaattacaccaaaagttagaactttgaggtgttcttgatctctactacagtgctatagtgaaaacctgtaatactgttttaacagtttgaactggttcacaataatcatgggaagatgtgctttatttttagtacatcttttcaattaataataacaaatgaggctggacgtggtggctcacgcttgtaatcccagcactttgggaggccgaggtgggtggatcacgaggtcaggagattgagaccatcctggctaacacggtgaaaccccgtctctactaaaaatacaaaaaattagccatgtgtagtggcgggcacctgcagtccctgctacttgggaggctgaggcaggagaatggtgtgaacccgggaggcggagcttgcagtgagccaagatcgcgccgctgcactccagcctgggcgatggagcgagactccatctcaaaagaaaaaaacggaagaactgtacttcccctcccatcccccaattccattatgtattaccatgattctgcatttgaactggtaaataataataaacctttctcaagccacaaatagcaattcagtttttgtctctttgttgacagggtggagttcagcctactctttcttagatgtgaaaggaaaggaagatcatttcatgccttgttgataaaggtaagttcatagtaattattaaataatttgagatgtttggtaggcatcgttactgctttttgacactccgactttgtggtatgctgaagttaacagaaagataatacattttataagatgaatggaatctacaattgttcctttagttatcagtaaaaacacataagataaggaaactgatgtaaatcaacatgacaaggtggatgtggatttgttctataatgagaaagtaacttgtgcttttcatttgaaatgttggcctacacacttagtctgttcctcaaacatttacacacttggtaataaccttttaccaaccattgctgatatcatcacgataacatgtttcaggttaataaaaactagattacaacattatgccattttaaagcaaatccatccattatacttttcatgctgatagttctagttggtgtcactcattttagagggcaaatgtgaaacaggtggcgtggacttcagaggccctacctctgacccacatatattagtgaacgttaacttggagactcttttctaagcatttactcctattatagctatttttatagtgtgctacagtgttcaaatgctattacgaatgctttaaatgaattcaatttgttcttcacaagtctgtgaaaactgttctgttaatattcccattttatagatgttaaaactgaagcattggaaaattaagaaaattgcccaggattatgtagatagttaagtggtagagtgggaattacattgagacctcctgatctttacttcagtgctatactgaaaaccgataatactatttgaacaatttgaactggctcataataatgatgggaggatgtgcttacttttgatatatcttttctaataacacatgaacaaatgtaggatgaatacatgttatacttcttaatgggtttgactttactccagtgaactctatcagaaattttttatactttaaatccttataaatctactcagtaaagttttcagaaacttacttttgcatatttataaaatatttcattgcttgcttaaaaataaccatattaaaagatggtagcataattttaattaagaaagcagaaataatgtactttacaagtattggtattactcctttcggggctataaatacaatatatatgtttttcccctggctaagtgttgtgaggttaaattttcagcatagtaagtttcagttgggccacatattatgccactgtgcataaaaactcacattgattcaagtatcagaatcatagaattttcttcatggagagagatggttggggagtaagccagaaataattggtcttgatttgggttgctgtctctttccaaaggttagcatctgaagtgtggggctgggcatcaggaaccttcctaccagggtgaggggtttggaaaaggttttgctcatttttgagtcatgcttccagttgttgatgggatcagaaattaaccccagaggaaaggggccttttaccaggagttgggatggggttagagaaccaatcagatggattggccttagggttggcatttcctgttagtgaactgaagtaaatcggaaagcagagaaaaccactgcctgtgcactaggctctgcaaagagagaacgagcgggtgcctataggcacctttctctagaaatacattttaggattaatttagattaatctagatcctacatcccctacccccagtaggaattataatgtctgtttttttgaagatttgccagaacagtgggaatggctcagcaggtaaattaagtttttaaactataagaaagtgaggccaaggaaagtagaaactgaaatgcaaacatatttttccagagatatcaactatcaaatacattgagatacattttatatatgtatagaagtgtaatatttattaataatagaataattaaaacagtatttttattagtgaaaataatctatgcttattagacaaatttggtagcaaaaggtaaattacaccacttcaatatcagcacttttatatttcctgtgtttgtgtgcatgcacatgtgtgcgtgtgtgtgtgtatatgcatttacattggaatgatatcgcctatattgatgaatggtcttataaaaaaaattttaatggctctatcatcttgtatcatcttatattttattatttcaggttttatttctaggatatattcctgaccgtggaataattagatcaaggaatgagaacatttttaaaggctctttaagcatattgcaaaattgctttcaggaatgctgtatgactaatatttgtttcaggagcatagaggggactggtttccactgttttaatgtgctattttttaattccttctaaggtttgttaaaaaccaaaattgcaacaaatttagtttaaagatactaggtttttattagcaattcatgaatcagtagcatctcatctaaacatttagaaaaggtgctcccatgagctgagcagaggacgttatttttataggctggaaagggctgaagaaagcagaaacaggaaatgaaaagtgaattggtcatttcaaagtaactttccttatagaattaaaacagagaggactttcttgttacactggcccaggtaaactaggctcctcctcattggctgctgtgcgtctcctaattttttttctgaaaacaggcccatttcaaagttcagtttgattatgtggctcccagccagataataactgcattctgagtgactccattttggtcttgtctggtatatagggcctagtgcagaagctcagtccaaaccagtggcctcccatacatttcatttaacaggttctgcttttttttttttttttttacttctgatatgcttggtaggcatttgtatttcatcttctgtgagttcccagttcatgtgttttctagtttgtctattacagttttagtttattactaatttgtgtgacctccttatgtaattaagatgatcagctctttgactcatttatatcaaatatttctaccatttatttaccctctattttaatgaatttaatgaagtatagcagtttcacattgcatattcaggcaggtttaatagattttttatttttttattattatactttaagttttagggtacatgtgcacaatgtgcaggtttgttacatatgtatacatgtgccatgttggtgtgctgcacccattaactcgtcatttagcattaggtatatctcctattataatttcttctcatttccagatgagtaccatttccagcaagtaaatggtagagctggtatttgaactggtcatatgattgtaaatcctatgctctttagcagtaccttatacttcctggtagaatagaaaagaacaagggactcttaaaatgtttaaggtattaatgaaaagtgtcaagtaaaacatttggatttatttgagtgtttacatttgattctttgggaggtcaaggcaggaggattgctagagcccacaagtttgaaaccagcctaggcaacatggctagacctggtgtctataaaaaattttaaaaaattagccaggtgtgctggggtgtgcctgttgtcccagctactccaggaggctgaggcaggaggatcacttgagctcagaggttgaggctacagtgagctgtgttagcaccactgtactccagcttggatgacagagcgagaccctgtctcagaaataaataaaaataaaaataaataaaatacatttggttcttatttttctcgtatccagtgatttttcttttcctgttgtttcgtccaggagatctttaaatttttttccccattattatagaattagaagtagaaaaatattttgtttaataactatatctcatgatatatttctgtcattaaattggtgtgcatatgggcaagactatactacacagtgaaaaatcagtttttaatacaaagtttgatactttaaaagaaaaaaacaatgtatattgaaaatactgtggttaaaccaaccatatggatcgtttggaattcctagactaaatttgaatttaattagttatagatttgttatttgtggtattcatccggtatctaagagaagtgattatcgtaacaaaatatttttatggaacatcttattatataaaatgacaatacaaattattattattttattcataatttttgactttttaaaaaacatgcaacatgctgttaagtatatgtgtgtttctcatttactaaaaaatagaattttcctagcaggatggccctagagctgaagcattatatgtctttggttggttctcattcaagaattggcagagtttcagagtactgtacttctaacttgtctccataaattcaaggcagaacagcaaatatgccctaaaaacaatgcattaaaatgatatatttttatttttactttttattttacttattttgagacaaagtctccctttgatgccaaggctggagtacaatggcacgatcatagctcactgcagcctcaacctcctgggcagcaatcctcccacctcagcctcctgagtagcagggactacaagcacacaccaccaccttggagtaattttgttttgtttttctgtagagatgggattgtacggtgttgcccaggctggtctcgaacttctcagctcaagcagtcctcctgccttggcctcctgaagtactgggattagaggcgtgaatcactgcgcctgaccattaaaatgaatttttttttttttttttttttgagacagagtttcactctgtcacccaggctggagtgcagtgatgaaatcatggctcactacaccttccacctcccaggttcaagcgattctatgcctcagcctcccaagtagctgagattacaggcgtgccaccatgcccagctaatttttatatttttagtagagacggggtttcaccattttagccagactggtcttgaacttctgatctcaagtgattggccctccttggcctcccaaagtgctgagattataggactgagccactgggtccagccctaaaatattttaatcaacttttaaagtcagaaaattcttgtgtgtggaaaagatgcaacatcgtaattctgaagttttaccttgcataatattgccattttttattgtggcaaaatgtgtataccataaaatggacaattttaaccattttcaagtatgtggttctgtggcattcagtatgtttacattcttgtaccattaccatcatccatctcaagaacattttcatcttctgcaactgaaactgtaccttctaactctgttttccagccctcagtccttggcaacccccattatgcttactgtctctgtgaatttggctgtaacgttactattgttgaaggatataagacctctcccccacaaacacatgcgtatttagaagcatgtttcttgttttggttttggtgtttcctcatgaatagattcaggtcatgtgtcctcggcaagttactgcataggtgatcttcagcagaagaatttggcaacgagaggagctgggttcaagttctaggctggggcaagtgtaatatttcaacttttttttttttttgcaatccactctgtcacccaggctggattgcagtggtgtgatttcagctcactgcaacctccacctcccaggttcaagtgattctcctgcctcagcctcctgagtagctgggagtacaggtgtgcaccaccacacccagctaatttttgtatttttagtagagacggggtttcatcacattggccaggctggtctcggactcctgacctcggtgattctcccgccttggtctctcaaagtgctgggattacaggcatgagccactgcacctggcctaatatttcgacctttctaggcctttttttcttcagccataaaataaggctattggtttcacctcatctgatggctaagctgccttttagctctaaaaataatctttgttaaataggctgagatatcctgtagtggtttataagtgaaaggaaagacttaggggtaagacagtgtctcaaccctggctatgcacctggctaaattaatgaggctttggaaaatacccgattctcatctctaaaagattgtgattctggatttcaaactcaagaatgtgtgaaaagctgtgtagggaatctaatggacagccagtttggaaatactggcatgaaaaaggttcctatgctactgtccccctcactgtttttttctttttttttccatggaaggatagaggaggatgacatctttccatggattttttaattaaaaaaattatttccccttccatagaggaatattttcttcatagcacgcagagggaacatgatagtcttttgtgttttttctcttctaggatgcaagaacaattctttcactaaatatattttatgttttcatatgggaacaagtatagctttgccttaatcttggaaacaagaaactttttctcttcgtcaaagtttagcttgagagtggggaacaggagtagaaataacataaatatttagctgaaaattgtgattttgcctttcacctttggtggtggtgtttggtatagctgccttctactgtgctaagcactcagcatatgttgtttcatcttatcttgtcaataactctttaaagcagaggagattttataatcctctttttgcagatgaagaaaatcagaatcagagactttacttacctgataacaggttaatccagctagaattggtagggtggagatttgaatttaggtcagtctgacttacagtacttttgaaagatacagtgtttgtgattttcatagggagggtcttcagatctccttctgcaccatgggatagaagtagaattaattgttttttgtaaagattgtttatcagttttcatggtttcaaatgtgggaattcatggtttacaacattatcattgctctgatttggttggcagtgcaaactgaatcaccttcagaatgcttagaggtaggatcagaactagccccaggctgaattatcaaaaagggtgaccttttctttcctgtgtgtgtgtgcgtgtgtgtgtatgtgtgtgtgtgtgtgtgtgtgtgtgtgtttccttccctgaattcccttgtgtttttagcctgcacccaattctcagtgcagggttctttctactcatctgcctttgcaggtgtcatcccagagagccttgaaaatagacttcgaaaagtgactgagctcacctcccttcttccactgatgagagaactgtatcagctggattctagtccagagctgtttgtttattataaagtgatgtgcatctgagggagagagtgtctgtgaactctctgaaactacatgccggatttctgtgtgtgtacattttctagcccatagctttatcagagtctcaaaggagtctctgttcaaacaagacaaaacagagtttttgcatcctatcatgttaacattatagatggccttatcttatattctctctctgctactaatcagatactactgtgatagcttattctccaaggatctcatattcattactcatccacatgctcatttctttgttgtttacaccctttctctattttacaaaatatttgaggttgtttatgtaaaaaaatcaagcagctcattaataacttaatttgttttttatctaaagagaatgtattttataattcaatatatatattaaggaatatattatatatgtattaaggaatatattctgtaatacatattaatgtgctaataattatttagtccctttgaagtattaaagatatgtcaataaattgcatcaatttgcagttaagctattgttagactaagggtaaagcagatgatttttcagtaatcctttgaggaacatgtgatttttttgattcatgtctctattcttcattaagctcaaagtttcacaagtagatggactgttgattccctagaacctaccagagtatttggcacttagtaattgtgttgaatacccatttaacagaatactcaattccacccctagctagccctcaaattttgtcaacttttagtcatttttactgtcagtaccttgatccaagggcactatcatcttttgctttaaactactgtataacttacagcctgctaaaagaatatttttctgactctaatctgcttcatgccaatctaacgtcccccttgaagtcagagtggtcttccaaggtttcaaaagtaatgatctaacttcctcaattgaaagcctttagtagattttcagtgccctttggagtaaacgtcttaactaactgcctactgttccagtttcatataaaaaactgacctcggctgggcgtggtggctcatgcctgtaatcccagcactttgggaggctgagatgagtggatcacttgaggttaggagttcgaaacccgcctggccaacatggtgaaaccccatctgtccttaaaatacaaaaattagctgggtgtggtggcaggagcttgtaattccagctgcttgggaggctgaggcaggagagtcacttgaactcaggaggctgaggttgcagtgagccaagatggtgccattgcactccagcctgggagacagagcgagactctgtctcaaaaaaaacaaaaagctgacctcaagtcagttaaatggaggatactttcaaattggataagagttgtaaccaccctagggaggttcttgagtttctcataaccttatttaggtgttaataaaattttcagacatgaataagatggcatcttatgaaatatcaactgcaaacatacattttatacttacagattatgattgagtaaatgcagcaatgcccccaaacttcccttctccatgtatctaacactctttgcagtaagacttcgtagttgttcctattaagaagtgaagtctgttttcccagctcttgaatgtgggctggtcttgtgatttgctttagccaatagagcacagcagaagtaatggtgtaccaattcccagcctgggccttaagaggtcttgcttgcttctgttccctttggaactctgttactgctgtgagcacgtgaacaggctcacttggtggaaggggagcagctaaatggagcagagccaagtcattttacttgagtctggccctctcagaccagccgtcagccagctgaccaaaaatgtgttaagacagaacagccaacatcagcagagccacctacctaacttgtacctgaccacacatgcttgagggaacccagctgagacctgaagatccttccatcttgatccatagactcatgagcaattaatgtttggagccactgagttttagggtagcttatttttgcagcagtagtaaacagataaacagatattagtgccttttccacctagtcactgagaagatgactaagtaaaaaggagcaagttgaagatgttgcttctttatttagcacatcattattattgcggtttagaaagatttgacaaatgcatttgcctgtttctaagaatttgcatagaatggtagagtttggacattttcctattctgatttgttttaaaaaccattataacagaatacaaaatatctttgttttttaactgcagccattggtgctaacatatttatcaccagggaagaaactttatttttcaaacttcagggaaaaaaagacattttgccaaaatgcctgaccactttgtggtttttgaaggaaatgttaagtttatatagaaaaaggacatgacttccatttctggcattatggcagaacaaatattttgaaaaaaatcatctaggatttaaaaatatatgtaatctaaagagctcaatctaattatttaatataattgtaaaacatattgctgacctggaaagatactaagctaaatcttcagaagaagaaataagaaaacatgaatccagaaaaatactggatctgaccaagccctggtcacacaatcctggaaatgtagcattcacagtgaaaggatgtacttggaacaaaactttcccttcagaaggaaggttagtaaatgtggaaaaaatgaagaacacaaagtaagatgatagaaataaattcaaatatatctttagttacaataaatgtaaaggtactgcactttttagttccaagacaaagattgttaacactgcatttccaaaaatccaggtatatgcagtttgtaagtgctatgcctaagttataaatttaaaaatggttaaaaataacaagtgaaaaataatatatcagccaaataataatcaaaagtaagcttggatagatatagtaagaaataacactttaagaatgaaaagcattgctacagattaaaaagactattacaatttgataaaagattaaaatattctgaaagatacagtttctaatttatatctgaagtctggtttaaatttttttataaagctaaaattaactgaattataaggggaagttaacaaattttcagtaggagatttgagcataatgttctctgttaatgattgaccaagcaggtcttaaatctgtaagcatgttggaaagttgagctctacaaatactgcacttgatataatggctttatgttgtatattatgctacaaaattgttgaatacacattcttttaaaagtcatgggacatgttttaaaaaatgaccacctaccttccagataactgaagacagtggagagttggtagtacagtaacctcttcaaatctcctccccaatggatatgaaattaatttaccactaataaatttctattcaaaaatatacactcaacatcacttgaagacagagaatgacatgactgcaaaataactgtaagttctgcagtccttcatactcctgcccctttcctgtcatgctgcagtgctttgtggtatacacacagaaactgggaatcacttagggaggaagaagagggacactggcaagggaacttaaggaacagttggagagaccactgtataggtcagatatacctcaaatctgaaaataccgaaaaagaaactgggaagatgggatgaagattgtgggaaaaggtttcaaagtatgtgctatttagagggtcaaattaacaattttatgggacagtcctccaattgcattgcttttcagggaggggataaaaggtaaaaaggaacgaagagcgattctttggcaatgaatgggaaaggagaaaagaaggaaaagggttaaattagggttctgtaaaacaaaggagaaccacaaacttggaggactcaactcttctcccctactactaaaacaaataaacgtataaaagaaataattttgctgacacctggaatttgccagattgaccaaaaaaaaaaaaggtgcctttaaactaggaattgtgtaaaatatcctcacatcacaaaataaaaaaaggaaaataaaaaatcatacaaatctattgaaaaagatcagatagtgaattttcatacaaatcaatggagggaaataccaccttcacccccaccccccaccaaaaaaaaaaaaaaaaaaaacaagaagcagaagaaaactgtgtctacattctaaacatttaaatatactcaaacatttaggtataagaaaaatacctttaatcagaaatttaaaaattaaaaacaaatagaaaaagcagggagagatgaaaaactactgtattgaacttggtaaataaatacaagaaaatgacaaaattatctcaaaaatgaagataaattacagaacacccaagagagaatagattcaaatgaaaattaataagcggcatcaaagaaaaacaggaaaaagaccaagaggatacaaatgacacgaagcaaaatgggtcatagagaaagtggtggaaatggaagactggcaataaaggaataatacttgtattacttgactctctgaagaagaaaaacaataattcacaaaaccaatatttaaaactataatccaagaaaatttttcagaaatagaaaaaaatcggaatccctatatattgaaagagcttacatgggcaaattaaccccaaacaataaacttggagatttagcctgtttcaacaatgatcataaaattctaagggctaacaggcaaaaagagtgtgtcatctaccaaaggaaaataattagactagcattagctattgaaaaccaatattcaatacaaggaaacaatggaacagttttgttattgttattattttttattttactcagtgaaataaagtggcaatcaagaattttgtatccaaactatttttcaatttacaaggctttagaaaagtagttttcaacatgtaagagtttatggaattttctatcaattcttcctgaggaatctattagagcatgagctgtatccatccaaatcatgactaggaaaacagtaaaatgactgatggtgagtatttaaaaataaataaatatgcattataagactaaaaagtagagatgagatatgccaattaaatcagagaagaggggaaaagaaatgaaaatagaaaaagatctttgttgtgtaggcaatattctactgtaggcagatgttaaaggaccatatgatttttcataatagcatgaataataacaatgataataatgatacaaagcacttactatgcaccaggcactgtcctaaacaccttctaaacattatttaattttttcacaattataagagttgggtgctgatattgatcattttacagataaggaaactaaagcagagagagattaaatagtaccttggtccaaagctggtaagtgatgaagctgggattgaggcaaaggaaggctgactgtaaatttttgcttgcacccataaactaagtgacccagtaacctgacttttctaggctagtcccaattgcagatattttgttgtatgattatttacatggtaggaaattattttatcaattttattgttagaaatgctattaatgatatacttctaatatatcatgatatatcataatgatatatctccaaggaaatcatatctctaaggaaaccattgtttcttacactggaaaagcaagacactataaaaacattctaaaatttgtaatacataatataaaatttcaatagtttttataaatgagatacaggttttaagagtcttattttttcttattttaaatatatactggagcctcaaagaaccagaaagaaatttataataaagaggaataggatgtcagtaccaggagcctcttgctggggatccaagagaggcctcctaattaatttttattgtaaattttaacaatggcgatgtttcaaatgtgttatctaaaagggaacttaatggagttttaatagtgatattttattttttgtcttcctatatttttatcgtaatttgcctgtgattaacattttttccagtaataatactgcaaaataaaatatctagaattaatcttgtatatgataagcattttctgagccaaacatttctaggccctgcgtcaactctgtagtatctctgtttttcagataaagaaacggatgctctaattgacaaagtgaaaacaagttaagattgaaattggggtttgtacaactccagagctcatgcatgttctctctgtactgctgtagttttaattctttctcaaaaggtgtttatcaaaaacaaataaaaggtgttgtgctttgttttgatatgagcggaagggctcattagttctgtgcctccttccttttttcattgctcctgctgtcctgcagagaactttcccatgcagaatagccataatataccacagccttcatgttccaaaaagggaaacctgagaaggagccacagtcttcctgcaggcaacagatggttactgtttaaatgagggtaaactctggatctcatctgtgaagtgactctaggttttttgggtgggtggtttggggagttaggtcaaaggaacaagctagtaacaagatttaggaggaggaggaagaagaagtaaacacaccaaatttgtctgtagctttttttgcccttatatactctttaatcatagtcacatggcaggttgtatttttctgacccctcctctaccccaaatagagggagaggaatgaagggagggcatggcaggctgttgaaatttgtagtgtgttggcatctagcaagtgcgttttgctgtggggtaagttctgtggcttgttttctgtcttcgtgaatagagcctttccaactttgccaagcctacagttaatgtggtcaagggatttattatgaaatgtactaaatcttggcgtggagctaattgcatataacaagaagcctgctagaggcttggacctgagaagtgacacatgcaaaaagcattctctttctgatgctgctgaaagaggttttgtgtaggggaatgtctgcatgtctgcacttattgctaatgaggtaaccccctctcccccaaagcttatttctgagttacttgttaaataaatgtaaaattctctctctctttccttcttcccacttttatgaacaattggcaattgaagaattgatatttatttactaactccacttccaaacctcttaatattataaaaatacatttgtggctgtaaattacatgagtgtaattatgacctagaataattctaatgtaaaagtataaaagtcaatcagagaagttgtactagtcttcttgggctgccgtaacgaaatactttagagtgggtggcttaaacaacagaagtttatttttttccacagttctggaagctgaacgtttaaaatcaggatgctaacatggttggattctggtgaggtctctctttctagcttacagactgccaccctcttacagcgtccttacgtggtgaagagagacagtgcatgctctctggtggctcttcttgtaagggcactaatcccatcatgagggccccatcctcatgatctcatgtaaacctagttacctcccaaaggctccatttctgagtaccatcacattgggggttaggactttggaatatgaattggggatgacacaattcagtccatagcagaagtggttaaaggaaaggaccaacattgcattttttttagttcagcatgtgcccctaaaacttaatttattttaaaatgtagttggaaaatagtaattggaaaacagttttttaaccttttctattgttgcaattttgttgtctatatcttctcatagctttattgagatattatctttatatttctcacaatatcctaatatgtgcattgtacatagtaagtggttagtatttgtgtggtacattaaacacttaatagcttgtttggtaacttaaacactttcccactatacattccacttacatcttattgctgaaatgtacagagataaagcaataaaacttggttctatgaaacaatcacatcctcttttgaatattatgagaagtaattttctgcagataaatactcttggattctgataacaaaagcctattaacagatacatatatgaaaaataaatgtgaagttttattcgtatcttctagtagtttttgtacatgtaaaattaagactttgaaacttaaaaggtaaatgatacttaaaagtaaaaacttaagaagtattatagtggctttcatcatatggttaacagtgatcttttcggtactagtggtttttgaagtggcagtaatcctgagcttaaaacagtagtggccacacattctaatcctggcacagcaaaaaggaaatgttggaatggcagcgtatgtagaattaggaaaaactaaacaaaaggtaacattcaaaaatggaatagcatagggattgtatgactcctagaacattgcagatttattaatatctagggcttaccagatcagttacaattttgatcaagtgcctcaaattggcattgatgaggatgataaaaacttcatgctttacagagaaagaatggtttgcctgtttgtttattcattcattcagcatttatatattgaggctctcttgtgtttgaggcaccatgccaagccctgtgccaaagagacaaatcagtgatagtttttaccctcaagtacttaattttttaatttactttaatattaaattgagtccctctgacatataaagcactgtcttggggctgtacttgcaaacttcattaagagtggtccttttcaaaaaaactcatgtctcatttagggaaattcacataaactcgtaattgctcgtagtttttaagtttaataagttgaggtttggtgccaggtctaaatggaggttaacatcccagaggaacatacggctttctaaacaattcaccaagtctggaatgtgttgtcccagtagattacgttcttgctacccacagggtggttggtctgggaaccaacagcagtgccaccagctgtgagcttactggaaatgcacgtttcaccccagacccactgaatctgaatctaccttttaataagatctccacgtgatttatatacgtgttaaagttagaggagctttaatacaagatttaacttgtagttataattatgtgagatgagattttatctgatctcatagttgagctgttgtttgttcatatatacttttaacaagcatttattgaacacaaggatttattgaacaagtatgatgtactgtaccgggagctgaagaccaaaaaaagggtaatatttagtcatgtttaatcattaaataaattctataacccagtaaagaagtaattctattggtatggagagtaaggagactttacagaagatgtgatacttgaactggacctttaaagacccacaagcatttgtttagtgagagatggagaaatatcccagatcattttctcaggtttcatttaactatcagcttttgagtaggtgaattagtagaggtgtagtttgttgaaaatcttttacaatttattaggtaagcttccaactcaagttttgtatattttaatgcattttgtcaatggtatgtgaatgtactatttcctgaggaaatgtgggataacgaactttggagttcagtttgagtaattttatattctgagcttcagtttgttcatctgtaaagtggggatatcagtcctgcagggttttcatgaagattgcaggagcaaaaaatctagcactatgaagttcagtacatttaaattgttgttaatgattataagaacaattttaggttttttttggtatagtgtcactaacttgtattagcaaaaggaaaatataatgtgaaatatgcttaaaataaaaatcttcctttataatataaatgaatataaaacatgaaaagattaaaaaatgaaaaataatgagtcataacatctgaaataatattttctccttctggaagaggcagacttgcaaacctaacattctcctttggctctagactttgcacttagtgtttatagtccatcccaggaaaggccttctctgtctgtagtaatggaccatttccgtctttcttaatgaggctttacctcaatgccttttaaatattagaaagcaaatttgtgtgaagtggactcttccccatgttgtgtatgggcttcccaagaagaaatacgtgcatatgttcttagagaaaatatgacttctcttgttcttttttttaaaaatttcacaaatttgggacacacattttagtaccatgctaataaagactggctggttctttctcatataaagagaaatttaaattggctttctctaatcagtgagagagaaatgttccttattcaacactcaggaactgggtttgtgcgttctatagctgcagtctcacatgacttgaggtgaaatttcttggtgcctttccattcctataaaatggtgttctgagaaccaccagtagaaggcaaaatgtaaatggatgatattaaacaaacaaacaaacaaacaaaaaggtggaaatggtggagagaacccactgctgcgtggcagtgtttgaaatggataacaacataaagtgggctgtggtataaaatttgagtcccacagtgaaatgtgctactcaaggtaaacagttcagttttgttgtccttggcagttcttgagaaacttgtcatgttaatgtaattattgaaattgaatttggaaattgtaatgttgctctcgtatttcacttaaaaacactgctgctaacgcccaccttgaaagggatcacatatatctcataagcagggcactgctaatattttagttaccccataggaaggatagtgaaatgaaatactgtaaaagcacaaccagtctgcattttcttttccatgcttttttccaacgagatgcataatgcaaaaataacccactacccaagtgctctttacaaatacacaaatggtactcattgtgtgttggagatcaccctgggtctctgtgaccttggcaacatttcaggggttacattttcacatagatcaactgttcttgaatagtttctccaatatattggcacagaccagcttttcttaaacagtaagcatttataccttctttccccaccttttttccctcaacaaacatagccattatggcctttaaaagagagagagagagagagagagaaagcgagaaatccctaattaccatttacataggagtttccatatagtctcagggcaatgttgtgatatctgatcttggtccacattttttccttattttattttaaaggattgactttttaaggatttccttttgagaatactctattttgcatattgttcccaatagaacggtttaaaagatatttgtaaaactaggcatttattttccctgagatatcttttgatcatttttctaaaagggaattgttgatttgattttttgttagtttggaattatttgaggaaagtaaacttgttgtatttcttcagacttggttttcttgggcgctgaatactgagagaagcagctctgtatgctagtttgttttttttttctttcacatcttaacatacttctttaaatggctgtataaataacataagttcctttgatcactatttgatttttaaagttgttttaaattcatgatgaaactactaatttcctcctttgggttctctgagtattaggcagaaaagttattctgcaagtaccatgatacagaagaataacagtagagaagaaaatagttaatattaatgtctcttaagttcttcaatgcatcttcacgttggagagacttgatagtaccatgttcaacttttaatgtaaacaagtatcacaaaattcttttttctgcttgattttacagttgtatggctagtccaaagttgaaaatgtgtttgttcttgaaagaaaaatgtccctcattgcttggattaatggtgctttaagacgtgtttattcaaagatggcagcacagaggtgaataggctaaatgctctacattagacatcattgtgtctttcacaacagatgcagtcagtgaactgtttatatagctgccttaaatttttctttgatttataatctatgagaaaatggaaatgtttgtcttttttttaacaaaaccttggagattttagacaaacgtatctagtattctaaaaaccaattcatgaagaagtctcagcctgctgcacttcagctctgttgttaaattacatattcaggttcttttaagaattgttctaataggcagttgaatgaagaaaaattattttgattttggtatgttagaggcaattcatttgttaaatgtgaacttatgacacttcaaaataattattaagaaatatcttggtatttatgaggtgtgtgacatctttttttttttaaaaataggctctatatagcatataattattaaacaaaacaattagaatttttttctaaactcatgtttctttttgtttggttattagaatcatcttgttagtattctaaaatagatggaagtgatcagactagatgctttagttaatgctaaaactgtgatacaaacacacaagtgataaaaggaaaggaaactaaccaatgtatggctatctttaggatgtcttgagagagcttctgttagcatttgagttaaattcttctggcgacacaaatatacatatatatttaatacactttttgtgaactttctcaccagtatgactttttaggtgtaactagcaatcttttagcaaggatagcagtaaaactttctacttctacagatttatttttcgttcaatgacgtactcctagttaaaagctcttttgggatttgtaaaaatatatctttgctaatactaactcaaagggtgaaaatgaataatatctttctttaggagtttgaaaaaagtttatcctcttgttgctttgttgaagttgatgtaacttctcaaattagtcatatataagtctgtgcatatatacgtagcccaagagtacattatttttgacagttaaatctaggcttgatgatcaaagtatctgtttcagtacagaaaaatatttgagaatgaagatttttattaacatttgagagatgactttatgtgattaatgttttaataccctgagtttgctgaattaaatctgaaagttgaaaattagcttgaatttgactatgatccttttttcaccagttaattatgtaatttctttgattatatgttaatgctgggaacttctcaagctcaaaacagtgtaaaaaaatagagctccctagagcatatgtataaatataaaatacctatgaattggttctataatcctgaatgaaaatgtaaacattttgaaagaaacccaatttgtaattataactttttttgcatgtttttaggtagacttttgcaggagttattttttcatttgttcctaaaagtgaaaatacaggtataagcaagcctttgtagaaaattattggctcttagaatatgtgactattttagaaaatgattaagtgccaaagtaagaccctattgtaaggagaggcttggatcaataagttaatataaactatatcctgaatcaaaaataagtgaaatgaatagagggtactgctttgaaagatttagtatctccatagtatttatgattactgtatgtttagtaggcaacatttatgaaagtatgatttatttatactttggcttgttcatgaatctgaaaggatcctagggaagcctgagatatttttcctcacaggctttgcatatgtaaatatccgccagtcagagtgggtttgaggccttgaccttgtttttctgaagctctctgataagaagagctgcctgctctccatgacaaggtctggccctgctgctgcaccatcaccttggaaagggggattaaagccccagtctggaatgacatgacttggcttctgtcccagctcttcctgcttatataggatgaccctgcgtggactccgaaaccttttgtgccttgggtgctcccaatgtaaataagcgatagtgttatctattcccgcgtgactcatggatattcaaaatcattatagataatgcgatgcattgaaaggcatttgggaattttggctgttaaggtactgttcttctgtctttcattcacccagaaaattggagcatttgcatctgccaattacccttttgtagtcctcgcttaccaccgagtatctggtgtaacttagtaaactgttaaaagaattgaaataaagaaaaagttagctataatcttacatatttctttttttctatgaattttaaatgagaaaggcaataatgtacatgttcttctgtatgttgctttgtacatgtaatagtataacataagggtttttttgttttggtccagattttttgtaaacattatttttgatagatgtataagatgttcagccaagaagacatactgtggcttacttagctcttctatacttggatgtttagattgtttctagtttttgatattatgaggtgtgtgttatgagaggaacatcttaatttataagatttgatctgatttgggtatatattcttagtattggttcttagcaacaaaattactgagtccaagggtaggagtactttaatgctcttgataattactgacaaattcttttccttttttttttttttttttttttttgagactgggtctttctctgttgcccaggctgagtgcagtggcacagtcatggctcactgcaacctcaaactcctaggctcaagggaccctcctacctcagcctcctgaatagctgggactacacgtgcatgctaccatacttggattgttttttaaaaatttttttctagagatgggagtctcactatgttacccaggctggtctttaactcctggcctcaagctgtcctccttcctcagcctcccaaggggctgagattgcaggcatgagctaccaagtgcagtcctgacaagttattttctgaaagattttaaatgtagtttaaatttgctacttagactagatattctcttcttggctctgacactttgatatggtttggcttgcccccatccaaatctcatcttgaattgtagttcccataatcgtcacttgtcacgggaggcacctcatgggacatgattagattatgggggcagttcccccatgctgttcttggggatagcgagagacttctcatgagatctgatggttttacaaggggctttcctctcctttgctcagcgtttctttttcctgccaccatgtgaagaaggacgtgtttgcttcctcttccaccatgattgttagctttctgaggcctcccagcaatgtggaactgtgagtcaattaaactcttttctttgtaaattacccagtctcagatatttcttcatagcagtatgagaacagactaatatacactttaaacacttcatttttctaggcctggttctttcaaaaatacttctcagactctccagcacactaaaataggatcattcatttctctcaagtggttgtgggtccctctctctcaaatttattaatgtaatcagaaagttcagtacattatcctgaggtaatagcttgtatagttgtattaatttcttgaagctgctgttacaaattacacaaatttagtggatttaaacaactgaaatgtattctctcatagttctggaagaccaaagtccaaaatcgttgtccctgagttggaatcaaggtgtcagcagggctgtgcaacccctggatgttctaggaggtaactcattccttgccttatccagcctctggtggctgctggcattccttggcttgtggtttgcatcggtctagtctcttcctctctggtcacattaccttctcttcttctgtgtgtgcaatttccctctgcctccctctcatgaggacacgtggtggcatttagggcctatgtggataatctaggatagtcttcccaccacaaaatccttaatctaatcacatctccacaaactcttttttaaaataacataacacttacaggtaccagccattaggacctgacttttcaggccactacaacttttcaggccactacaaagatgagtaagatagtttgactaatgctttggattttctttaaatcatatatgtatatatatacacacacacatacacacacacatatatatttaaatcatatatattatatataaatcatatatatatgatttatatgacacttctgggaaattatatggttgaatatgaagtgcaaatatgaatataaagatgtgaaggcttccgatagtattatctcttcctagtaatatatgacctcctgttaaatgtggtatatttctattttttgagatgcagcaaaagaagcgttgatgttttataactggtgtttaagaaagttttcattagaaacgtgaaatttcctaattcaaattcatgaaaatttgagaaaatttattatagccactgtcaaagttaaggaggaaattaaaacttttccttttgaaatgggaatgtctgtactggaattaaactgagcatgttttctccctataaatactgttgatgtcaactaagtttccctgttcgcccacacatggtacaattatagtttcaggtatatatttctgacaatctataccaggcacagagcttgctattcgaattaccaccgtacagttctagaaaatagcaggttgtcacttctagatttgcagcaagagagaggaacttaaagaaggtgggagaaaaggcaagggttagaaataacctgccagttctaatcctcagaatctttgcataaacaagattggaatgaaaacaggattttttttttttaatttggaaacctgtaacttatccagtcataacattccatgctgagtgcatgcacattttagaaagacaccacagtgtaatgcgctaggttcccaaatctgcttcagtgctggctttgtgtataacttgaacctaagatgtcaattagctggatggtgtatttttacatagcatccggtaacatggaaatagaggataaagtggccagcaaaaaaaaaaaaaaaatagcctaacagaaataagttttaagaacattttacatgttaatcagagtgttaagttctgtatttgtaaatgcaaaattgtaaaggcacaatttaagttttaatttgtacatacaaatatgatgatgacttcagaaattttcaatgcctagtctcagctaaatacaatgcaagtgtattaaaaacaagggcagagtttcagaataaggaaagttaacaaaagcaatttaaaataagtcctaaacctgattattttgttcaagagtacagatatatatgttatttgaggcagaagttgggacagcatagaagctgtctgtattatttgaatagtcagaatatcaagtagtaagcaatttgattactttttaggggtgtggaaacaattttgttaattttgttatggcaaatcttgggaacccaaataacttaccaaaaaagggtatacttctagatgttttaaaaatacatagtcctcacccatatctctggaatctttgagacagtttaccaaacagtaaagcaaaaaccaacctgaaaacaaaaagcaccaaataaagttgcccaaaaaatatgccccaagagtgtcagacctcccgtgatgctaagctttgcacatccatttgaaaagtagactaaggtcttgtaacactgatggttccaaccctggaaccccttgggcagagggccagttaggtgtccttttctgttaatactttgtgcagggttggtaggggccctcagctcataggttgaaactcaaacaagtattctctgcttcctgggtacattggtcattgaagagatttaatgtttccaaattgagtgttgtgacctattaatggggtcatgacatcaatatagtgggtttcaactagcaaatacatagattaaaatacagtaaaatcgaaaatatcagaatgcctcacctgtaaggataagcattgttttgtgaaaattttgtttaaatggtgcaacatgatgtaaaatcttctaataggctattcttagatctcagtcagaataagactccttccttgtggagaaggagtgcctaaaatattgttagatctttgttttcagatcttgagagggcccgagagaccggatggcagtttattactgctggcagttgagtgtggtgagaacatacagagaacgaccttgaagatttagactatatttaacatgactgagagatattcttgaccatgtattcacttccctgaaattgacttaatcagttcaaaagcttgtctataacctaggaaatacaaattaaaacaacaatgaaatatccctttaaacccgtcaaattggcaaaaaaatagttgatatctgatatctccaaagttggcctgaatatggcagaagaggaattcttttctttctcttgggaaagcaattcgacagttccctgtaaagcagaaaatgtgtgtatcctctgacccaacacttccatagctatgcatctgccctggagggactcttctcctgaacatgggcaagaacacttgcaccagagtgttcattgtactacttgtatatgtgtgtgtacaaaatggagtatagcaaagattagacatatagtcacataggtatatattcatatgaagatatatctgatctctgctatacatactctggttcatttcaacaatagactggttaagagggctctgcagactgcatggtgtgtgtgtgtgtgtgtgtgtgtgtgtgtgtgtgtgtgtggggtgtatttaaaggaaacaacttgactatccctctcttgagtaattaataacacacaagtttatgctgcgaatatagcagttgaagtgaatgaattatatttatacctgtatcaatggaaattcaattcacacacacacacacacacacacacacacacacagagagagagagagagagagagagagagagagagagagagagagaagatggggaaaaaaacaaactggaaataattcatgtaatataatgccatttatgtaaaagtttggcccacagaacacaattgtgtctgttatatctaggcattcacacatattaaaacaaaaaacctgaatgaaattatattctgaaaattatttatctctagagaggaagagagtgagaaggatgatggcagcacttagtggtagtgttttagctattatctagaacattttctttctgacaaaagtaaacattctgaagcctaaatagcaaaatgttaatatttagtaaatatttctgaatttttctgtttttttctgaagtattaaacagcttaagatatagtctgttctatacaaagtagaatcatttaatctttgagttattgcttaatacatatgttgggaatttcatatctctttgaatatattaaatttaaaattaacttactattttgaagaaaggacaaactttaaacccttgcagtctcctttgctaatctctgctgtactcatcttcactttaatgatggaatggttgagagtgtaaccggaaatgttttctttgttttgcttattctcaattcagtctctgcagactactgaattcaatcttgatgttctccaagtatgctctgttcactagaacagaagctctgtgagggctaggttttgatctctgcttcaccagtgtgtaatgcttggcacatagcagggtgcagtaatatttgttgaatgaagaaataaatggataaagaatgagtgctttttcatagcctgttagtttatgtatgtagcatgactaagtgcatattatatgcaaaataaagttatggcatagaaattaattagatgcttctatattaatctgttccttacttgccttctagaacttagggcaaagtgtatttttctgaacaagtttgtcagctacctttgtttgaaaagtaagaattcaatttaaccccttacccccttttttatccccgagtcccagttagtttagttaagtttagtattcgatcagacagaaaagaatgaacttattatactcctgtctctatagtgtctatagtttctgatttctgtgtttgcttttgttcttgttgctgctctatttaattcttaatcatgtaaattgcctcaaaagtctttttgaaaaaataaggacaaattacttccataaaaatttatattcttgtaaagttgtatattacttactttttttttttttaaaaagacaatcttttaagatgtttctgtggtccagtatttttaaaagaattcggttatgaattttatacagcagatgcttagtgttatgggctgaattatatcccttataatttatacgttgaaattaaaatgtgattgtatttggacatagtgtctttaaggaggtgattgggtttaaatgaagtcattgggggtaggccttaatccggtatgactggtgtccttataagaagaaggtgttaggacacagtagagaggaaggaccaggtgaaaacacacagaaaggacagccatctgcaatgcaaggagggaggcctcagaagaaagcagccctgtggacaccttgatcccagacttccagcctccagaatagtgagcaaataaattgctgttctttaagccatccaatgtgtggtatttgtcacagcagccctagcaaactaatacacttagtgaagtgaataaatatgtacacatccctcttttattttataaacctacattttaatagacagtaacatctcctttatatcttatgatgatatggaattcttattttcaggaagttaaaaaatttcaaatgtgtattccatacaataatacttcatgtttgtgtcattctttatattttaaacaattggtacacatcatatcattagatagcaatctgacatcaatgatttgctgtagaaatgcgttccgttgcataagaacatttcaatgtctgtgtagtcatatgacttacagatgcactataataataataattaatgcctataatagtgactttgaagtactaataccattcaggcactttgccctttcagctagatttaatgttaatgttagtctgttattctaagaagtggtaaacaatatatattaatgtgatagcagatagggattcagaatattaaatttgctgaaattacttatcccttacttaagttattggtgaatattatttatggcattgcttttgcagtaatgagctgtgttagttttaattcagccacctcaggtgatttgtgaattacctgtaagagaaatcaaagactgtaaacctttgttcagttgtgaaacattcttttgcttattctaaaatgaaagatgtgctaatcaatgatgagcaacataattttctgtggtagcaattgtggaggtaagttctctgaggttttaaaatatattacattgtaaaaaacttatatatgaaaaagattggttttgaacctactcactttttagcattggcttgctttattccacaacatagtaaatgtcgagaaaaacgaacttggaatattgcactcctatcatttgtttttcttcatcatccctcagcattctatgtgtatactttaaatgccacaagaaaataaaagcagtattttatgaaatggtctgccctaaattttaaggattctcttttcaataactctgagctttaaaagtcttggaagctttaaataatttctatttttggcaaacaccatgagaattgttttggataaattatttgaaaatagatgtcttcatttaagtcatattctgtttgtgaattcctttacagatattgtccaaagatggggaaaattttcttttagtttaagatgatcaagatggttagaaaggcatgatgaatttcttacctggcctaatagcatgaattaatttaaatgaattttcttgcttttattcaaaaaatagcaaattatgttttatttttcactggactgctttagacaggcatagcaaatatcccaatttaaattttatctagaacatgtagaccttattgccatttggtattgcttctgtagtgaagacaactgattactaatgcaaacagtaatggctaacaatttgaaaactatagtttttataattagcttatagtttaaaaacagctcttaataactgaatattttttacagcttaatcagtgaaaaataatctatattttctgtcaagttgagttttatgaaaataaggctttttaaggctttttttgactactcagatcttacatttacataatgttctttaaacattttcccttttaataaatttcattatgtattgtaccccaaagacaccggctgtcattgggattttgttgcacgttctgcattcctttgcatagcctggcagctgtgatactcaggacgtctcacacaggatgcctgcctacctctggcttctatggcttaactagaggctaactttatcactgctgggcttgtggtgggcaggacagtatccctgtctctctgattttctttgcatttacttctttatcttgatggaaaatttggaacttttactaagagaacagtgatgtattttaacatttaaatagtggaattcttcttttgtttattcttttttttttttttgtcacgaatagacatttattttcctttaggaaaatatcaagctacaaaggagtaattaatggataataagatgaacaaagtaatgatgattttaaagaagtatttctaaggtttgttctgtttttgtcaaggagactcctagttcctgctcagccaagatttttcttctgtgaatagtgtttggatataattcacattatctccaatgactctactttttcctggctgctaaagataaatagctccttagattgatattttctttctgttgatatattgggtaagtcagccagtttagagttaagtctagttgatttgaaaatctgtatgggtacatgccttgaaaatgcccttggagaccaaattaaaattaaaaccattttttgttttgcatggtacttattacttttgttatgtcaaaagcgcagtctgaatactgatgcatttcagaccacacatttattcgtgtcttatatggggaaaaaacaaacacataaagtattcactcttaaggggcaacagccctaaagtaaaaacattttatgactggccagtagtcttcctgactgttcatttatgaaagatgcatcctttccaaatacctaatgcatgtggggcttaaaacctagatgatgggttgacgggtgcagcaaaccaccatgacacatatatacctatgtaacaaaccagcacgttctgcacatatatcccagaccttaaagtataataataatagaaaaagaaagatgcatcctttcattttgtatctccttggcctgatagattgttgaagtaaacacttgaagacaatcatatatttagggtagtgaagactactgattactaatgcaaagagtaattagctaacagtttgaaaactatagtttttataattagcttatagtttaaaaacagttcctaatgactatgaataactcataattttggctccttaacacaaacaagatcatttatattataactattataattgagttaatttatgggttttgtagagcaactcttggattatctctctgtagggattattcttcctgtctccatatagatatctcagaatgtttcattgctatcacttttgagtacttctcagcataaatgtgtacatcacagttctcagcttcagatcagtaactgtgggatgtgcaatagaacaatcagaatgcacatgcctatgctttatcctagatgtgttactttagaattttggaggtggtagctggataagtgcatcgtggaaaagcttctcagtgtattctgacacactcctttcatgaagaggcattgactataccataaaccctagaaatacgtcattggcaatgctactgttttaaaggagagaaaggcatctttttgtttttgacccagaatggcattgcctataacaggtgaaagggaatcatgctatgttaacaggaatcaacattatccatttttgaagagttcattaaacaggcaatatttatttggttgtctgttctatgttaggagctttcagttcagcactcaggcagcaaataaggtaatgcctgtgcatatgctcggtcctttctgtctgtccaaagctcctctcttctccattccccttttgcctcagtaactcgtctattaagatgtaaatcaagaaatgccttctgtctcagggaagcccttaccagaacctctaggtagagttagaggctaactccacggcaccctagagtccatagcatgttgttatcatgtgtgtatcgttgcatgtaaaaatattcctatttgttacggtttgcttgtatgtgtttgtcattaatctattaattcattcagtgaagagatgccaacttgtatactagcctgggaaacctctgtgtcctcagtgcctaatttaatactcctttttctatctagtagtaaaatgaatatgaatgtacatgtctgaggtctctataaattaaaaggtaaaaagtcttaagccaggtgtggtggcatgcacctgtattcgcagatatttgggaggttgaggtgggagcattgcttgaggccagaagtttgaggctgtagtgtgcaatgctcttacctgtgaatagccatggccctccaacatgggcaatgcagtgagaccctgtctttaaaaaaaaaaaaaaaaaaaaaaaaaaaaagaaaaaacaaaaaaaagtaaaggtcttggggaagggtccacagcaaataagtagaggaaatttgagctgttgttgccctgtaacaggagacaagaagatatttttcataagaattgcactttctacactgaattagaaggttcgatagtatgtcagaattatggaattttgtaagggtaaatttaacatattagttagtgtgtatgtgtctgatattttatacatcacatttgaaattgttttttttttggttcctattaattcattcagtaagcattgtttaaacctgtccttcttaaactttatttttgcatgatctctgtgatgctcttctctcctggttatctttcttctctcagtggccccgtctcttgtgcttgcttttcatcctaaacttctaagcagtagagcttcttaaggttttattcctatcaacatctcttctttttctacatcaatgatctgtaatatcacccttttttaagggtctctgtaccatctttatattaatgattccccagtttttaatcagcttcaatccttttattatagagagtaattaatttcaaatactcggtcatgaagaaagggtagactgataggtatctgcagctgaagacaggacttttcatcaaatccaatggtggctcattaaagcattcaccgaagtcagatatcttctctttaaaaacattataaaaacccttatcttttgcttgaataatgtctccgtgttcatagttcttatcgactcttcatgaccttactctgtgtcactgtcctaggactgccgtaagaaattactacaaacttggtgtcttaaaacaacagaaaataattttcctcaccattctgaagaccagaagtctgaaatgaaggtgttggcagggccatactccctctaaaagtgctaggaaagaatcctttcttgccttttcccagcttctggtagctcctggtgatcactggtggtgtttggtttgtggctgcatcactccagtctctgctttcacatggctttctttatgtatatttctgtgtgtcctctcctcttaaggacagcagtcattgaatgtagggcccattctaatccagtatgacctcatcttaatgaattaagtctgggaatataattatgtctgggaatataatagagaagactctatttcctgtgttctgggtgagtatgaacttttgggggatactaacttactatatactcactaggttaatctatgctaaatacccaacaggaaggcagctgtagggaaaagcaagagtatgaaacctggaaaaacaattgccagactctgctgcttgtgggtatgtggccgtgggtaaggtagttgctctgtgctttcagcttcctcatgtacaaaattgagataataatgatgcccactttgtggaattcttgtaaagatgaaaagattccaaatatgtaaagtgcatagaacaatccccagcaaaaagtggaacatgttagtgataattgctgtcatagtcggtcttcttgcttagtaggcctgagataaaactttctcctatttcatccctcctcctccctcttcctgattttacatgttatttagttgtttctccctctcactataattatttgtgagaagttacaagagttatactatggtagagcagacaggctttgcacaccttcagggtcagttctggaccaaaccactcagaaaccactgcacggatgaatggctggagattgtggggcctattgtgtctccaggtggctgtggttacatgggatccctggaatgttaattaattttcatatttccctttaaggtacttctgtggctcaaacaatgaatttctgagttaggtcccaaagtggcatttttgtttgccaacaccctcataggaaactgtattagaagctttcttgtaatatttaagagcctttaaaagagcgagactccgtctccaaaaaaaacaaaaaaaaagagcctttaaaagacattctagatacgtaaagttagtttaaaatctgttctgaaggctagcactggagcctttgctgacatcttcacactaaagattctgagattacttttaggttgtgtgccttgcaacactaaggtagatttattgcaactaaggggccctgaggtaagccaacatattctcatctttcttctgaaaaccttttggcctcattagaagtatttggctttaaagtttgcctcattttatattatcccatgcaatattttttcctctcagaattagaggaaaaaatacaccatgtctcaggtgatagtagtgcttggcacttacctagggactccagatgtattcattgaagtagattgaagtctcttgaattctttcctgctattagagagcaatggcaaaaagcaagattcaatctagctaagtaatttataagataagctaagtaacataagtttggatgttcagtataatttgtcaatgtgtgctttttaggcatagttgcttatttctattgtaccgtgaaattaaactacaatattaaaaatttcaggccaggtatggtggcttatgcctgtaatcccagtactttgagaggcccaggcaggagaatcacttgaggccagaagtttgagaccagcctaggcaacatagcgagacccccatctctaaaaaaataaaaataaaataattagccaggcatagtggcacacctgtagtctcagctgctcaggaggcggaggcaggaggattgcttgagcccaggagtttgaggttatagagagctgtgatggtgccactgaactctagtctggggaacagaaagagaccctgtcttttcccactccccccaaaattgagacaattcagtttaaaaatccttatgaataaaaaaggacttattaaattgactcacccagtacttacgtgaaccacatatactgtactatgctttcacttctttgacctatttttttggatatttgatacatactaatgtattcataaaaactattctagtttcttctctttgtacagtgggatgagctgaggaaaactactcattcattcattgattcacaaaagtttaaagtctaaatattactggctttgtgccagactgaggatacagagatgagtgaaactcaatcttagtgaatctggaagagggaattgatgtataaaccattaaattaaaacatagtgtgaaaagggcaagacatagcaattattaactttatctagaagtcaatgtggggagaagtgtgctgccaggtggtaatgcctgagctgtgttttaaaacatagaagaagcttgttggctgacaggaacagaggggaagaaagccagcgagatcttctcagataccatggcttcacaagatacagtgtatttaagaactacaagcaacttgattttcccagagtttgcagtacatgggctttatgtttccgggagtcctctagtagctgtggtcttcagtgtggtttctggaaattcagaaaattttactgacctcatgatatgttccaaatcatttgaagagataatataatatactatgaagttaatgatcatttgcacaagtgaatgtaaattaagccgtgataactgatatctcaaagttggagatattacaatcagtattttcaaccttctttctgcttcagtacatctaaggtatataaagcactcttgttagtaatggtggctccccatggcaataactcttgatcatgggcagtggtataggagtaggcccaatttgtgtatttgctaaggtcaatctagtttctatagcagatatatctccacatataagtggattaacacactgtattagccctttttcatgctgcttataaagatatacccgagactgggcaatttacaaaagaaagaggtttaattggacttacagttccatgtggctaggggagcctcacaatcatggtggaaggcaatgaagagcacatcctgtcttacatggatggcagcagacaaagagggaatgaggaaggtacaaaagtggaaactgttagatctcgtgagacttattcactatcatgagaacagtatgggggaaagcacccccatgattgaattatctcccaccgggtccctccaacaacatatgggaattatgggagtacaattcaagatgagatttgggtggggacacagagccaaaccatatcacacaataaatatctgttttctcatttaagtaaagtacaaagtggaagctttttactgataagagggtatgaggtgggtggaggttagattggaggggagtgggcctggctccatgttttgctcagagattcaagctgatagacactccactttcttcatcaagtagctttaaaagttgccttgggtgttcccagcaaagtgggatatggggaaagagagaatggaggaggtccatctgctttttacctaagtttagaagtgacatacataacctttgctcatgtctccttggtgagaatcagccaggaggtcccacctaaatgcaaaggaagatgggaaatgtggtctttccgaacaacagttcagctctatagaaggtgaccacaacacagccagctgcctctgtagccaaggctttttagactctccagagggagtgaggggtatgggaataataggtagctgagaaagcctcacaggtgattctggtatgtgctcttagggagggcacttttctctcttcagctgatttgagtgttattacaactagccgtatctcttcctgtgtagatacagatcagaaaatttagggagggtaagttggaggcagaattaaatgtaaaacttggattcattctttcatgtacaccattctgattttccttcatttctagctgtcatggtgtgctgctttttttttccagccaattttcaatgtcagtttttgttaaaattgtttaaaattcttaaaactcccaggaaattataacttttaaatacattttaagctttatattgcttttggaagaggtgacacaatcctcagattgatgaatatttgatgtaattttttatttgagtaaaattttattgaagagtctattatgaaataattttcaagtgggcaacatatatgtatagtgtagctcataggtggagattaagcatattttctgctttttatctctttcaacaacaaatgctgtgaggtttacattattagcttataaccttatgtaagtggtgttaacgagacttaagattaacagcaacaacagcaaaaactcttggaaagagattaagaatttctgccaccactgatagttttttgattttgaaaaagtcacttccttttgttaatcattgtaaagattgaaactattgcggtaaacaggatgcttagtgtgacagtttgaaccacaaatttttagtcctctttgtcatttgatttaaatatctaaactttgctttgctttctccagaggctctgctaaagaatggcaagtgatataccaagcactgtgtggagtctcagaaggtgatttctggtcattgttccattgtattcatgcttattcttactaattaattatctctgtgtgtgtgtgtgtgtagcctacaatgtttcaggctctgtgataagccaggtggtggatgaggggtacaaaaagacataatccctattctcacaaagtttatgtttcagtgaagcatcattcaattgaacttttgtgatggtggaaatgtgtgtctatctgtactgttcatcatcatagccactagccatgtgtggctattgagcttttgaaatctagctagtgctgctaaggaactgaattattatttaatttgaattcatttaaatgtaaatagctacacttggctggtggctatcttattggatagggtaggtcctatggaaatacagacattattcaaataatcatggtaaaactgtgaaatttcaagtctaacaagtgataggaaggaggtagataaaatgctttgagcacctatagaggtttatttcactaatacaggcaggtcattaaaagcttaagtttgagtggtagagatggggagaagtggacaaatttgaaggatagagtagaaaatggacaggatctggcaattgttttgaaaaaatgttgtgcagctaggtggtctcgaagatgccttctagatttcttgcttgtaaaactgaagagatgaggcctacccactaagagagagaacactgataaaggaccagatttacgggtgaagcaaatgagtttggttttgtaatattgggttggaatatataggccttgaagagagatttgggctggacatagacagctagtaattgaagctataaacaaggatgaaagagtattaattgagtgatcagagtcactctgaaagtgagtcacttagagtattaattgagtgatcagagggccagtaataagctgaggaactgcagtgcttaatggtgagtatgcatgcaaaggaaggataagaattacggattctgagggagttgaggaatcactgaacttaaggttctaatgaagtcaaagaatggttttagtggatacagttgaatgaggaggctgggaggagaaagggtggtggtttctttatgatagttggataagtaaattttgagatgaaatatttggtggtgatcataatattcaggagtcaattagggaaatgggtgaccgacatacaggtggtcactggagattaggggactgtgagaccatatagattaataaagtgaaaacatttcatctcattttgactaagtagtcaacaactctctctcctgttagaattgtaagctattgatatgaatgctataatatgcatatatttaagtagtaataccttatatgaaactcacttgttatggtgcataataaagctgatgatcacgcaatacctcaggaaaattttgatcattcagaatttgcaggtttgctatagaagatcatttgaaaatgattaaagatgatttatcccattatttaaaaaatgtatatgacctcctcaaccttgacaggtaccaataataaatgccttgaattttgcatgtgtgacattaaaggtattatcacagattaaatcacctttccatgctttgaaatctttaaagctgaatatttgatcactcatctttcattaccattgattatttctagctgcccttacatttttttcttctttgttttttataattaactaaaaccacaacctggaaagaacatgagttatttgaatcttgttttgaaaaagccattgaagttttaatacctgcagggaaacagatagttatcaaaaccatttggaatcactctctctgaaccaattctcacccctcctcccatgcttacataacagcacacataaattgacttttctagtttgggccaagttgttaaatataattctcaaattattttaaacatagtttgaacaaaagtgttcaattggacagatgtttcatcttttctgtaataatacttcctctttaaaaatgtttttgaaatcgacacaattaacataatgaagatattactataaaggaatgatatacatgaaaataccaatttttaggtatgatttatttgattatttctagcccttcatagttgccgcttgtttgtgtatgtgtacaatcacgtttggtcatcctaccaataattccacaaataatcacaaaagctttaatatagtttggatatttgtttctgcccaaatctcatgttgaattgtaatccccaatgctggaggctgggcctagtgggaggtgtttcagttatggggtcagatccctcatggcttgatgccgtcttcacaatagtgagtgctcgggagatctggtcatttaaaagtgtgtggcacctcctttctcagcctcttcctacttttgccacgtgacatgcttgctcccattttgccttttgccatcagtaaaagctccctgaggcctcccaagaagtcaagcaagtgccagacccacactttctgtatagcctgcaggaccatgagctggttaaacctcttttctttgtaaattacccagtcttaagtatttctttattgcaatacaggaacaacccaatacaaagaatttgtactgaggagttaggcattactaaaagataactgaaaatgtggaagcagctttggaactgggtaaggggcagaggttggaagaatttggaggactcagaagaagataggaaaatgaaggaaaatttgggatttcttagagattagttaaatgatggtgaccaaaatgctgatagtgatatgtacagtgaaggccaggctgccgaggtctcaaatggaaatgaggaacttactgggaactggaccaaaggtcatgtgtgttatgccttagcaaagaacttggctgcattctattcatgccctagggaactgtggaagtttgaacttaggagtgatgacctagggtatctgaaagtagaaatttctaagcagcaaagtgttcaccatgtggcctggctgcttctaacaacctacactcagatgcaggagcaaagaaatgacttaaaattggaatttatatttcaacaggaagcagagcataaaagtttggaaaatttgtagcttagccatgtagcagagaaagtaaaagcttatttggaagaagaattcaagcaggctgcatagcaaccacttgggagagaaatttgcataacaaaaaagccaagtgcccatatccaagacagtggggaaaaggcctctaaggcatttcagagaccttagccccagccctggccatcacaggctcagaggcctgggagggaagaatggtttcgtgggacaggcccagggacctgctgccctgtgcagccttgggacattgctccctatatcctggctgatctggcagccatgtctcaaaggggcctaggtatagcttgggctgccactttggagaatgcaagccataagccttgcctgcttccatgtggtgttaagcctgtaggtgcccagaacgaaagagtgaagaatgcttggcagcctctgcctatatttcagaggatatatgagaaagcctggatgtccaggcagaggcctgctacaggggtggaacccttacagagaaccactgttaggatggtgctgaggggaaatctgaggctggagcccccacacagcattcccagtggggcactgtctagtgagactgtaagaagggggctgctctcctccagaccacagaatggtagatccactggcagcttgcaccctgtgcctggaaaagccagaggcatttaacttcaacctgtgagagcagccatgggggccgaaccctgcaaagccacaggggtggagcttcccaaagccttgagagcccacctcttgcagcagtgtgccctggatgtgagaaatggagtcaaaggaggttattttggagctttaagatttaacgactgccctgctgggtttctgacttcagtggggtctgtagcctctttcttttggccagtctctcccctttagaatggtagtgtttactcaatgcctgtatccccatattatcttggaagtaaataacttgtttttgattttacaggctcgtaggcagaagggctttgccttatctcagatgagacttcagactgtggatttttgagttagtgctggaatgagttaagactgttgggaaggcatgattatattttgcagtgtgaggaggacatgaaatttgggaagggccagggcggaataatacagtttggatatttgtcctcacctaactctcattagtgctggaggtgagacctggtgggaggagtttggatcatgggggctgacccctcatgacttgatgctgtcttcctgatagtgagttcttgtgggatctggtcatttaaaagtgtgtggcacttccctcctcactctctttctcctgcttgcaccatgtgacatgcctgctcctgcttcaccttctgccatgagtaaaagttccctgaggcctccctagaagcctttcagatgccagagcatgggtcttgtacagctggcagaactatgagccagttaaatctctttttttagtattatctagtctctagtatttctttatagcaagaaatacaagttttttttcaattaaattatgatggaatgaaggtttttattctctaatttttctcagacttaagtcttgaggcagttctattaaaatcaaacaagtatacatacatcacactgcattaatacattttcattattctcatgtgtatcctcattttaaatggcaaatgtagcaatagaattgttttattcattgttacaaagaaatgcaacttctggatgggtgcagtgactcatgcctgtagtctcagcacttttggaggctgaagtgtgaagatcacttgagtctaggagtttgagaccagcctggacaacatagaaaggccctatctctgcaaaaattaaaaaattagccaggcagtgtggcacacgcctgtagtcctagctacacaggagactgaggcaggaggatcccttgagcccaggagtttgaggctgcagtgagctgtgattacataactgcactctagttttccagcctgggcaacagagtaagacactgtttaaaaaaaaaaaaatgaagcttctatctttaaacttcctttccttttgaactcaatctgctgagtaagctatttttggttagttaattctctttagtgtaactatttcatctttatttttgatttaaccctgcctatattactcttattatatggcattggtacctgtcacagggaacttacttctcctgtgtcagtgggtccattcagtgttccctccattattttatttatttatttattttttgctgttgggaacctggctttatacaaagtttaaacatgtgtctgctgaggagtgatgggttcttcctagtcatttgggtcacatgtaggtatttatattgaatcccacaatcccagctgtttgcctttaatgttgaagatcttataacgtgatgcatcatgttatttcttcttcttgtttcgaggcctctgctaccccaccaactctttcaacatggctgtacctttcagtgttatgttctgaatctcttgcaagccacacccaagtcatccatacgcagacgtgcactgccttaagtatatttaactgtcaccagccttttccacgatgcattatattcccttgtcatataggatatggatttgagctgagagttggccttctcttagagcaattgctctcaaacttttatgactagtaattatggtaagaagtacatttaaaattataatccaacatggatgctcttgtatatacacctaacaaacaaaggcttcacaaaccaatacttatccttgctacttggaatacaatgtgatattttctacactagtagtaaattttaaaaactggacgttttgacagagacacctcattactaccccctttatccaccccctcaacccacccaagaaatggtttaagccagactgtagagtttgagaagtcactaaaacttgatctccttgctctgcatctgtcttttcttctcatactctcccgtggccacaaggagcaggccttctttcttcctgcatgccagggcttcccttttcatcataggctgagccttttctatattatgggcaaagtctatgatccagctcttgatatgggaatggggaactaccaagaaaaataaattttctaaaaatgttatacccaagatgatgatttaagtcatgtttttctattaggagattctcctaaatcattttgtttctactctggaaaatactgatgaataaaagtggggacagtgtcgtcatttttctatcatattctttattctgttgtttgaaagtaattgtctttcaattgttcgtgaatattaataattctcctttttattggattatggtgcctctagtgttaaaagtattttcttgcaagttttcgttgtctgggttcataattttgaggagattcttcaaacagtgctttatatgatatttaaaaatggatatggtaagtattgaataaaaaagaaaagggatgttaattgtactttttatactggttatgtggcattttgacaaattcttttaaattaaaactacaaacaaaactacttttcccatatgcaaggaaatctctcttcatacagaacagttatttcaatttcttttacaaagaaaatattgcctagaatttttattcttttattactttctgattctttttattgaaatgcttattgtctcttgttaattaattatattaattatacagctagtgctcagtttctcaaccttttccaaaagaagtccccggtttccattaaagagttttatgggggctccccacacgtcaaatttcacacagccggctacattggctttttgcaaaggtctttgaatgcaatgccaaggcctcccactaattgttttatgggctcagtgtgggatctgcatccctgactggggaagccccatgttaaaggactgtgggagtgaggagttgtcaaacacaccaagagcgagtactaaaaaaagtcctggttagctgtaatgttgctgccaaggagcataagcagaaccacaaaacatgccacatgctggctgattttaaatagtgacccctatttcagagaatactcacttcattacatttttgggagaaattcaaatcacaaatagctacataattaatttgagtgctcacttcaagctttggcattggtaaattattgttttccaagtggctaaaaagatacaactaactaaatatttttatgtgttctttcaaggagaccaaactcatcctggttatctgtgaacatttagtcctggaataatatgttcaaagttgtatgcttatcttttttcttccgagaagattaaggaagtatgtttttacccattttaaccattaaattgcatgtacccacactaataaaagtaactttttctgaactttaacaaagagctgtagtggtagcattaagactcctacaccctcactaggccttgacattgatttttctcagcctcacggaatctgcttggcgttttgaacctgtctttcctccagatattgaaacaggatatttttgaggtacaatatgacctcagagtgcactgttagcttggctaatattgatacgtgaacagaattattacagccacacttcaagaggcctagaatagtaatactgtattctataggaagacaagtgcattactcagttcttgcattgctagaaagaaatgcctgagactgggtaatttataaataagaggtttaattggctcacagttgtgcaggctctacaggaaacgtagctccagcatctgcttggcttttggagaggcctcagggagcttttatctgtggtggaaggcaaagtgggagaaggccagtcacatggtgaaagcaggaccaagacagaggaatggggggaggtactccacacttttaaacaaccgcatctcatgagaactcacccacattcatgaggacagcatcaagaagatggtgctaaaccattcaagagaaacctgcccccttgatccactcatctcccaccaggccccatctccaatattaggcattataattcaaaatgagatttggtgggggcacagatccaattatatcaataaatacaacctatttcactgcaggattgtagcattaaaatgaaatgacatattgatatttttgtgaattttgaagtatctttttagaagttgatggagaaagagtcctttttttgtaatctaaatatgttcatctttaaaagaagatcctaatattttagataaataatcttggattagcaatttttctgaaaaaaaaaattctcattttgttagcatgttttctttccttttttgttggctggggaggggcagagccttgctctgtcacccaggctggagtgcagcaacacaattactgcagcctcgaccttctgggttcaatctatccttccacctcagcctcccaagtagctgggattacaggcatgcagccccataccctcttaatttcttttttcttatgtagagaagggagtcttccagtgttgccccatctggtattgaactcctgggctcaagcagtcctcctaccttggcctcccaaaatgctgggattacaggcatgagtcattgtgcctggcctagcacttttcttatatgtgtgtgtaacatgtggatacctcttgtgggacgtgtgcgtgtgtgtatgagagagagactgagagatgcctatatgtcattctcattctattgtgctgtcaacacaatagcaatgtttaatggataaagcaaaccacaaataaaacattatgtatataaagtgcaaaattagtttcgttttgcagactacagaaattaatttcaatagtctgttgataatgttttagcactattatttttgttctttctaagttggttataagattgcaaaatctaaagcatgcgggaacctttgatggtaatttcttcatcagtgtgacttctagaaactttatctcaattatgatatatattacaattatcttatataaaataatattagtaagcatgcactgactgtgtggaaaattactcctgaaagccagattttgtctctgggtaaccacttgctgtgtctttattctgaataagaatcaacagtatgatccataaagccaacctaatactctttatttagataaatgttaaaatacctttacaccctctataaggttaaattgatcatttgctatccagaccccaaattatgcaatcttttaacaattgtcaacatttcttctctaggttgtactaaaattttctctttattttgagttccgaagagccaaattggatagagtgctcaccattgcttctatgctgccattaggttaatatatcccaaaggaactcacatcaaaagtgctatttcattgacctattttccaccatgggtctctaaaatgctgtaaacatgcaacatacaattatgtataattaatttatcttatatactttgtttatctttgtcagacattttgctttgtaactgttctatagaatgtccttctcttcattttttatgtacatgatggtgaagtttttaaaatgaaaacattttaacatgctacctcctttagaggtagcataatattattcctatttgccgatgagaaaatagttttacaggagtttagtacctatcccacagtcacataccacctacagttgggatgtgaatgcaacaggcttatgtactctgaaattttggatttatgaaaggaaataaaggaaatattgaaattgaagggagtatttagatattctgatttacttgttggtgaggtgtatctggtttagagactactcaaggtaatgactagcagtagatatgccattcttactgaatgaatttgagagccctggtttaagttttggcacttccacttgataaatgagtgaaccttcttggacttaagtttctcagattgaataataataagtttagattagctattctttttagccccaaagctttttattcaaatgaatttatttccagaagctgtttttgtagaatagataaaatcagatgtgttcttgttggaggtgaaatagtgggaagagaggggtggttataaaaccttctctgccctgtttgcccctacctctaggcacagtttgagatgttctagattagatgatctttcggctcaaagataatttgggttctagatctctttgactgtgatttccggaaaggtcctgctcacacttggactgggtcttaggaaaatctatagtgtgacactaaataacatgcataaaccactcttgatgggttgcctttgacactgggttgcttccagttattatagcatccaacttaaggatgctatgtcttgactagcatatgctgtttgggggactgtgatgttctctttcatttttggaagaaatccttgacccttccgaggagtattttttccctgctacttgacacatctgtattacccgtatatggcaactatagttagttttcttcactttttctaggacaagcaagataaagttggagcttcagaattactgaaactattctattggctgaattattttattgtttatgtgattttcttgtataattatttccttgcccttaagtttctaagcaaaacttactgtactcttaagttggagaagatactaacttttttgcattacattttgctttctcaacattataaaacttggagtagttggagaacctattaggatacctagtctactactccctgaattaggaataaggatacttgggggcatttttcatcttttgacaataaatacatccttgtttaccccatcactgctctcaaaacaaggactatgataaagagtggggacagaagcctcaggtgtaggatcagaatgtgtcccagacatgcatgttaaggtggactgttttactgacctccaacattcatttgccacttctctccaacaagacagtccatggtttccttctgagtattcataaattttcagggaagctgacttcacatcatgtgtgcaacttagatcaagacaatcagtgtatttaacgtttcttgctatagtgatgtgtgtcatacagtgacacacataccgtatgacacatatcactgaggatgtgagtctttggttatttgttgaaccactgaatcaggccttacctgaggcttatactacttaacttttcagtgatgtgagccaaaaaatcttcttcatgtttatgttaatttgaataatttattgccactgaactttggctgctacatcaaagcctttggtatccttccaatttaacttactttcctagaagtaaaatctcctggccacttagactgtagtttcctcacctattaagtgaagagtttgttttgaggtatacaaaatacatattagatcatgcttgtcctctctgccttcaagaactggaacttatgtctgtgaaatcagaaattggtcaatctccctcttcctatttagaatcacctgccttgtagccacccagactccaagcatgacattaagaatatggattcctcccataccagcagcataaatgtcttacacttttagtcagtttcacaatttatgttgacctctctcctttcttcactctagaaatataatttttaactatgcaaattttgaaaaaaaggaatggacataggaatgatgaaaagtggtcatttttctattaatctgtaattctgaggcaatacacaggactatagggaggctaagaattaatgatgtcaaagataagtagtctgttttgatataagtcagtgaattttactgttgtgtttcttaatcacatactggcttccaaaccttagccagtcatatcctaagtgttatcagaagttaaaatttgtgactttcacaaactcactatttgtgaatttcacagatgagcccaagtctttcacccagtgttagcaaaacaaccaagagcacatgccttaaaaattctaagtccatataaaatccacatgtaaagaaaagcactgaagagctttgaaacttggacatggtaccggagagattttaatgggaatttggatatttgtaaggacttgaaccaactattcaaaaaataaggcaaagaaccaagtaaatttttaaagctgaatgagttgtgatagttggtggggtgttagtggaaaataacttttcttagtttgtgccaaatggtgataggcagcaatcagggctttataagaattcaatgaatggtagttttcagcaatccaatttcacgcagcaaagattacctgcaaggcacacatttctccttccttcctcccctcctcccttcctccctcccctttcctcctctttcctccccttcccttcccttttgtcctttccttcccctccctcctaccctccctcccccccaatccctcccgtctccctccccttctctcccttcctttccttcccctcccttcctccctccctgcctccctccttttcttcctttctttgaaaatgacagctctaatatgtgtgactcagtgatgaatgcccaggaaagaatatttatgaaaaataggtatgctctttcactttgcactgcaggatatttggtgcttttcgttctgaatagatgttttataggtttcgcaaattttgtatcagactcttcttggtcttatccgtaaagaccaattacatgattatatttaggccttagatggctctaatatgcttgatagcctgacttttgcagtgttttcctacattctgaattattatttaaattcaagatgtttagattttacaatttttatttaaggccaagcacaatattagcttagaggagtttgccccagagttcagatgcatctgtcattttgaatggatactctggggacctttcttaatttgtttctctcacaaacaccttgttaaatttggtgatcatgtccaaagtcagcagtgcatgctgagtttcatgagttatttggctatacattaggttgcattttttaaaactgtcactattttcttgaatcttacagtgttataatgatttataggggtgtgtgtgtgtgtttgtgtaaatggctacctttgctttttgtggtttaaaaaaatagttaaaaataataccttcaatggtattcataggtgaaaatctagtagataatgtttagaaaacagaggacctcaaattaacttatgtgttgacctttacaaaaatgtgtaatttaaactgtctcattttattttgaaaacttattaaatgcatgttttttctttggtagaatcaaaagagttatttttaaaaagatatttcctttctcaaaattgacctaatatttactttctttgaaagttatttgtgtataatccatttacccacaattcttaagttttgctaacaataactggtgaactcagatgatctggacacaactagtgcaagtcacaggcttggtgcacaagaaagggacaataaaagctctagtggacagactggtttgttcattccttgcgagtcactgatgaattgatttggcttcaaactcgtgctaacatattaacattttcaattaaattcagcaaataatgacagtgttactatgatcagatcattaggctcctctagatgagaaataattgtagtgcatttcctgccctcatggagccagtggattgctaatggcatttaaggcaaaagcaaaaataaacaatattcaaaatgaaacataggaactatacaaggcacagacattctgtgagggctcctaaaagggcaggatcagagatgaatggggaaagtaaaatcatcatgaagaaattgatgtttgagtttatgaagaaacagatgtttgagattattattgaaggatcaagtagtcttttggtgagagaagatgggagaaaaggacattcagttggcagaaatagcatagtgatgttagggaggtcagaaactgggaaatgcagttccaggatagcaagcctgaaatcgttgtgcatgaaggaaactgccatgttatggatcttaaatcccaggccaaggagtattcacttaatttgccaggcaggggagaaccattgaaagctgaaaagcagtaacttggaactggactttatggagagcagttgggactctgcttaggaagaactggaatgcattcagaaagttgcacagatagagatagtaaagggcctaattgcattgtggcagaggtaatgtaaagaaagagaccattgcctggcacatcgagtatgtggaatccattgtatttggcagctaattggatatggaggatgataacaccaaagttttgaggctgagtatctctggaatgttggttatttttgttaacagaaactgggcagtcagaagaggagctgtttgtggagagtaaatgtaggaatttggtaaaagtgctttttcttatattgctctagtaggcgaaagtctcgtcaaatgattaaatatgtgtatgtggttattttttattttattttctgttttattgtattttttttttttttagaaagagaaataaagctatgttgcccaggctggagggcagtggtatgatcatagctcactgtaacctcaagctcttggactcaagagatactcctgcttccacgtcccaagtagctaggactacaggcatgcaccactgtttatttttaaaaatgtttgtagctgcaaatcttccgaatgggtgtgtgtagttcttttataaatttcctcgagataaggtgtaggcagaaactggtattattgtgcatgaaggcagatcagttacattttcatcttgataaactaaaaatatttttaagagttgaaatctcattctaatttctggttgattcttttgagacagcattgggcgggccctcctcctatgttgtcatgcaaattaagtggaaggctgggttgtttttttttttggcaagtcccttagtaatataagaaaaaatattattgtttggctagatgctaatgtgaataaacagatggctggcactatagctgttttgcctgagatatgaaaacatgtaaagatataaaacaggccccttatttttgctcattggtctttggttcatataagatattttacctgtttatatcttttatgtggttgaataataatcaactgagcaattaattggggtaacattactaagtcatttatgtcatacagaatctatggcataatctattttgatgttatatttgtattttatgagttttagggataaattaattttactattctcataaaactcatttatttttacttttatgcccccagaccataagattcatttaaaagaacaaataaaatgatttgtgacacaactctatgaacagttttcatgatacatgcactgaaaaccaccaaaggcaatgcctcccaacaattccagcttccttagattgtggagcatgaaacttggctactacgatggcttaagagattcctaaatgctttaatccagtaagtgtcccacagcacttctcttaatttccactgagattttggttacagtcaaagccgtcgttaaacatttgtttggtattgccttgggggatagtggcatgtcttaaaaacttgggcagtgtgacttgcagtggagaaactaaactagaatcacttggagcatttaatatgtgccgtgacctatgctagaaccactctctgtatgttctcacatcatatttgctcctctgtaacttttgtatcacttctgttatcatctctctgctaaaactcttttgcaaatgtcatgaattacttctttgcaaaatttaagggccttctttaagtccttttggtgtatctcaggatcatttaacactcaggagtcccttctcaaaactgtgttttctggactctcctcacccacttctgaccacttgtgctgctgctgctttggttcctttgcaagtttctctatttcctctgtgtcccttcttggtgctctcagatcaatttgaagctttcttctcttagccctattctggctcattcttcccgcttttcatgacttcatttaactgcactgtagctgatgcctctcatatcttacatcccagcacaggtctctctcttatgcaccagatcctcacgtcctatgatttctgcacgtctccacttggaatgataaacaagaacttcaagcttgacacgtcccatgtcccaagctaacctcgtcttcccttcccccaccagatttgcttttcctcctgtgttccctaattagtaaactgcatctctgttctccttgtggccaaaagcagaaacctaggaattgtccctgattccttgacttctctgtgtcttcaactcagtttttaaggcttgcttgttctgtctccttaatacttctcaggtatgtccaccattctctactttaaactaagactgtttaggattacatcgtttttcaccggaatcaccacaactatctcttaactggtttccctgcagccagttttgcaccttctagtctgttttatatacactctgttgtatatacaaagtgacttttccaaaattcctaaatggattctcagaataaagtgaagaaacttcagtataacatatgagacccttgaatatatggcattgcttagatcttctggttgcatatgtcaccacacattccatgattagctcccagtggtcttcagaacctagctgaagcttccactgtggttcagattggctgttccctggtatttcaggtgagctctctgtcacttctttgtgctcctgtgacacagtgttggactctaagacactgtattgcaatcatttgctttcttattcactacacttttagaatttatgggtaggaactgtgacttttttctgtgtatacttaactactaataaggatttagtatagggctagtaggtatacaatgggaatgttgaatggattaatgaataaccaaactaggatgaataaaacctacaacctactttcaaggaactcactgcctagtgagaagtttacaagtaccaatacttttaaaaagccatcaacagacaattacaatatagtgtggaatgagctattaaaactcttgttttcaagtaggaagtaattaaatgtttatctcaagtgactatctcttgaagatatatcatagaaatatgcaaaaattttcaaggcatccaaccatgtttctttgaaatgaggccttattgtgacactaaaaatatccagagcactttacaaaacatttttattgactatttaaaactttaccccatcttttgttttgtcagttttatgaggactaagaaaaaaaaataaggcaggatatattaagtttctggacatctctttggctggctaagtggcatgaggaccattgcttaattttcttttcctttctgaaactactataacagtttctactattgaatagggttttgcgtgattctggcctctgactttatgcttggtagctaattcacttacagctagctataaaaaatacagttttctcctcctctattgaaaataatttaggaggacaaatgcatttttaaaaacttgggcctgttatttttatgaacccctaggatttttaaatcctattgtgacacaattttactcataataatagagcaaaatattgtcaaaaaatttagtgactcctttagacttttaaagttacaaatgttatacacgtcgtggacttttatgttgctggaaataatcaacattgtgaatattaactctgtgattgaaaggacaggatctttttaagtggttttcaagtcatgttcctcagggccctagaatttcaggggtcatagggagctttgggggaagctgaagagtaggtgggcaggctctcagtgaagctctgcagcctctgcctgcagcttctactcttcaattatatcagctgcttttatctgttacctactggagtgtgttttgttttgttttcttttccttttttaggatatcatatttagagtgaaaatactttgaaaaaattaagaaaacccgtgaaaatagaaagtgttcagatttcgttccctaactgtcttcacgtgtcacctacagtgatatcctcaaagacagcaagggagggctgcatgcttaaaaatgctgggcaagcagagtaccctgtctcatctgttttccatcagagccgttcagtcaccatgtggcgtttccattgtctggtcaatagaacctgtgaaccagggcctgactagggttggtgggggagtgtgaggtggaaatttgggggatggcgagaagcagaagtttaatgattcttaagagcaagggaaaaggttgatgttctttccactgtcatggtgttcgcatcacaatactaaggactttcatgccaggaagccaaaaagtcaggtcagaattttatagattttggccaaaggctgttccaaataaaaagtaagtgtttaaaggtgctgaccattgccctaacttcttcttccattcttttggttccttacttttctcccctgccccaaatagggttatcccaagtgcaaaattcaagtgactgccatagtaaccacacaaatagatcacagaggagttccatttactttaatgtcatgacagttgaagaaaaactacacatggggatacctttgggtgacatagatgatgatataaaaaggtatctgtaagtgataggctggaatggactttgcccataaaataatttggatcttaagaaacagatatcactattcttagtttagggagtaactgcatcttttgaaacactttaaaaaagttggcaatgttgattcaaaatgctattttaaaaaacttgcaaaatgatatttttttggagaaactataactgtcaatttgaaggatgagattctctttagcagagcttgtaaaaatatccattgccatatgtgaaacaggtttagggcagtttgtcataaataaatgagtttgtcaaatacatacccacatacaccccttttttggccttagaggatgaattccagagccataaaaaaattggcattttacaacacatcacacagataaatagacattacattaatatacataataataagaaacagtaatttaataacagggattaattatgcctggaggaaagatagtgttggagggtatcaggatttgctggacttggctaggtctgacggttatatcaactgtttgatgagaatatcactcagaaagttctgattcatcctgtattctgtcaggatcatcatctttgttaatgaccttacttgactcaaactgctatagtagctacaatagcttcatttctaattgtaaaagtaatatgtgtgtatagtaagaatcgtgttttgttccactacccaaagataacctctgtcagcatctggtgtatctttctttttctttgagtgtgcatattatatataaaagatgtatatataatgctttttatataatattcgtatgtattagaattaagctattcataaagttgtaagctgcatttttatttcattcatttaacaattcttcattgtttgcctgccataatctagggattttatgtcctattaactgttccttgaaaacatggcacttaacgacttcttattccattatatcatagtttatttaactttttccttattgttgtacattttcattgtttcagtttttactattatacataatattaaatcattatcttttgacctccttaatactttaatatctcagtatttccgattatttcctgaagaaaaattctaagaaatgtagttatgtttgcataatcctcaatttaatggcattgagtctgggggaaatgagacaaactcaagcttttatagagcccagacaataggattgtctggagaaactataagacatatctactgcaattgtttttcagtaatccagcatgctggatggattctaaatggcctggtgtttaacatcactttagtaaaggtgtatcagggttctaacatagtatggttgaccaatatgtaacagatatttgttatgacagactgtcattgtaaactgagttattctttatcctgttattcatttctcattactgttctcagagatatttgagacaatctcaacacccaattattacgtgtaaaacagttgttagagcctaatcctttgcacacttctgggtcagtgatgctgtaaaaacatttcactgtaccatgacctcactgaacaaaagaaaacgaaaagtttaagagaaaagaaaatgcctacacagtacataggtattccgttgcgttgtatgacagtcaacaaacttggctctgttgtatttccaactatgtatggtatgtggttgttttagatacaccctgcagtagctgatggctcaaggtgaacaataactgatagtctctttctctgtgcatatgtgcatgagtgcacatgtgtttgtttttggaaatatgtgatttggttcatttcagttatttgtagcatccacgaatatttagtcaagtgttcaatcttcccatgaaatacttcagagattcatcatatgaaatcatgggcttctctttagtgctaagtcatagcaaactatcatctttttaaggttgattttgtagagtgttaaatgctatttaaatttcccttagataagaaaccatttatttttctcctaatcacttgaaatagcaagaactaatcaactggagtttttctcctttttatgtatacaccaatctaccgctgactcacgtgcatgtttctgcctttaggtcagtgggaacttttcccagctatggttttttttttttttttttctcctccttcattcctaatttctctcaggaacaaatggcagcatagttaagcgttagaaacttgttgccgaaggtgctaacctaaacatcagtgccaggatacgactgagacttaatagactaattaatttgtctactgcacccctgacctgggaattgcatacaatgggctatacttatggaactgagagtctgagatccaaagtagagaaaatgcaacttttgtgtgctttctgtatcaacatggaattaatagttttttccccctgcaaaataggttttaaaagtggaattttattccatcatgtttttggaagcatgatacttcaagattctgtgtgcctttttgtttttttgttttagttttcttttttcatattttatagtagtaccaaatgaaactttcacattatttaatccaaatatgaatatgctgctcacctccagaggatcccaattattacagaatacaagtttctactttgtatattttaatataatagtgtgtagtgtgttttcataactacactaagtcatagaaaaaaaatatgaacttgaaacttgaatgacattttgaaactgtttgcattatgaattcctaactatggtattcatacttctttcagcaagtaaattaattttgtttcctcttgtattccttttcttgcttctccattttaaagacagcttaaatatgcttcaagggcagtttgcatttgacttccactgaatttatggcactagatagaaactaaattgagtaaatctctttctattagcctgtcaatttatggaatatatatgtctctggatcttgtgaactcatggaggtaccaaataaacccctattacgatttcatataaaacaaagttttaatattttggtaatttgtgaacttggaagcactcattagaccaccaaatatgtgttgtgcacatgccaggcacccttctaggcaccgttgataaagtggtgaacaagacgggcattttccatccctcctacagcttgcctttcagtagtggaagtcacacttaaagtaaacacacagagtaatgaaagaaaatcaagacaaggctgatggttctacaaaaaaatgaaacagagtaaaaggacagagagtgacttgtatgtgtgtgaggtggtgtattagcagaaatatttagggcatggctttcagagaggtaatcttagagctgagaactaaatggtgatatggtagcctttgggtagatgctgatttcattcagttattgccagccactttacctgaaagaatatacaagattcatattcatctcagtataggcagaatgcctgggacatcatagatgctcagaaaatgttagcggggagaacaaaataaaatatatatgggcatatgatttcaggggaaaatgccttatctttctaaagttatgttgcctctaacagaggagtgaaaagtttagattttgtgtgcatttttttgttgttagactataatgtaagccttggattaattttttttcctgtattattgttatttttgtattttataggtttcacagtggtaaagtcagtgggtgtacttgaagtgatgtgccttgtataaacgataaagtcagaaaagagtgcttctattggaacattttgtgctacaaatagcagcagcatgtttatctgaccgtggtattcatgctgtggagctctaaatcaagttgaatttgctatgatagtatacctcacagaaattaaatcattaatgttaaaggaaaaatcataaaatgattttttatgccaagttatacagaggcagtttgccatatgtctaaccaaaggtgtaagaccagtaatttgaatttcgtgggacagacaggagcaactagagaagggaagaagtcaaatggtgtagtggccaaataggatgagtgactgtagactatttactgctttcaaatgaatttttgtacccattgtcgaaagaaagcctgatgaacaggtatgtttgcagcttctttgctttgacaggttttttgttgttgttgttgttgggggtgaggggagtgggctgcaagggagatggaatttatttatttttgaacacgtagtgtttgaaagacattgggagattattggatagataaagagtttccagtgtaggctttaaaatatttatcttgatctgtttcttcttgttgatactttgagaactacagttttaaagatagaaaaaatatttagtttatttccaaactaagaatgggtttgcctttcagtagagctttatgttaaatgttgatgttgctcagtccttcccttggctctcttctcttctcactccatttgttttcatctgtacttaggcttgaaattagcacagttctcttctctgtgtcccttagcgcagatcctcactgtttctcagactctaaaatagtttgttaacatctgttcatttttttccccttccaaactgtctaccatttcatcagcagaatggatatccgagcctatcactgtctctgcagtgacccccagtgcctccaggactggaggaatgtgtcttgtggcatgtagcgtcctccagcttcattaagtccttgctgccattctagccttgttacttgtcaccaccctttctatacctgtacttacagcctatgcattttttatagtccctcattgtactggcctgctcactcattcatcattttgtttgcacttgctgttctctgttagttgaatgccattcctacctcttctcttgattgggaattttttatccttcacgattctatttaaatgacctgtatcttttttctgtgatgttttccctggcagagttaggcacttcctctgtcttcccgtattaatgccttgaatacatctccattttgattctcagtataccccttaaaatgtttgtttacatggctttctcacatccacaaaccctttatggacagacactgccttctgtttttctcttaatcctcatccctcagcacattaacaggtagggatttaattgtcatgcattgaataaataaactgactcctgctctacgtgtttagcaccctgctattcatagtggaaaaaaattaaaagaatatgattttgttccttattctgtttagggttgagattttatctgacgggcaagacttaaatacatgaaataatgacagactacaacatattgcagaatatacaaatggatttttgttttttaaattttatgtatatgtataaacacacacacagacacacacacacacacacagacacacacaatccatacacactgcaggagagggaagggcaattcttaagtttcagttatcggatagcaatcataaactaggtaagagcttagttgggatagtgagggagtgagattggaagtggcactatggtttgagccatgacaaagtagtggctatgggataaatgagtcctcatatgcttattttacctatcttattttcagtaaatcctagatatttcatataggtttagtgtaaaggcagatgttgatcattttaatttgtaaagcaccaaaaataaaatcaaggaaaatagaacactgaatgaaagttgaggtatgcattgtgctgattctatctggggtacatgagacagaaagaaaatttagggaactcatggccatgttgttccctggggttctgagatctctagctagtcatctcctctccactcttcatagtcctcttatgtgtgttttgtatatggtgtccatggtttttaactgtactagtgggagaaataagaagtgcttgggagtctgaggcgggcagataacaaggtgaggagtttgagaccagcctggccagtatggtgaagccctgtctccactaaaaatacaaaaaatagctgggtgtggtggtgcacacctgtaatcccagctacttgggaggctgaggcaggagaatcacttgagcccaggaggcagaggttgcagtgagctgaggttgtaccactgcactccccactgggtcacagagcgagactgtgtctaaaaaaaaaaagtgcttatactccgtttttggtccagaatcacttagatgtttaaaagttcctatctggtccttggattttgttgttgaagcatgttgaattgatagcttttcagaagtagagaattagaggcctcaagatgctttggattgtcagaccacagaaaactgtaataatagcttacatctactgtataccaaatcctttaaaaagcacattatagtttccactatcctctatttcttcaacaaccctatatggaagagaaactagggcaaaaagagatttgggagccttccttaagatcccagatatcagcctgggcaacactgccagaccctgtgtctacaatttatttatttttttaattagccatgtgtgggggcacatgcctgtagtcctagctacttgagaggctgaggcaggaggatcacttgagcccaggagttcaaggttgcagtgagctgtgatgcagccactgtatgccagcctgggcaacagaatgagaccctgtctctttaaaaaataaacaaataaaagaaaaaagatcccagatactctgattccatgatctgaactccgagcctctatgtcccttctgccatttgacaaataaaaatgtttttagggctctgacatcctaaatgggaatcaccaactttcagcaaaggatgaaggaaactgatgatagaaccaagtacttaaattgatacattcctatggagattctgtatgtaattaaaaaaaaagctacacctgcaaatttaaattttctccacatttcttctttgctctagaattaattttaaagcttctgtagttaagcagtaatccaacactgtaagttaaaatcaggataattaaagtcttcaataatctttaatataaaatttaatagttcttgacagtgtggggtctgtgataatattagtttttcatgaaaatttaaagactgtaacttgaaagtaagcttgagggtccattgtatttgcatatttggatattttcctagactaatgtagtgtactagtttgtgcttgattttgtcaggtttgtaaaatttataaactttgctactttaaataaggttcagagcaaactgataactaacctttgatgtgttactgtagctttcttaggttcttttaaatcctgtatagagacaggcagctagaggtagcatattaccaacaaaatttagtaatagctagtaggaaacctcatttgttcttttgcattttttagggatagcgattatattttccaatttttatgatttgattatgattcagatattatctaggaaaaatgtcctgttttttatttgacacctttttaaagccaaagccattttaggacatctttgccaaaattgaaggaagtcaagactcattaaattatttggtgaactccaccagttattttagttagtcactgtgatcagtgctttaacttgaattgtttgttttgaatcagatactattacaaagtaatctgatactactccttccctcacccccttcctttgtttttgtctaggagttaggccagcaacactaatgcatttgggaggtattattatattgtaaaaaataaacatttgtgaattaataaaacaagaattgtcagaatacagttagagtttgggtgtgttaatcatttcttcatctgacttcttgtaaattgaggcattttcaatatggcttatggcaagcttgtccaacccgtggcccacaggcagcatgcagcccaggacagctttgaatgcggcccaacacaaattcataaactttcttaaaacattatgagatatttttgcaatttttcattttttttaagctcaccacagctgttgtaagtgttagtatattttatgtgtggcccaagacaatgcatccagtgtggcctagggaagccaaaagattggatacccctggcttatgggattctcagtatgacacagtccttggggattaaaatttctatagccttgctagagctttaagttcttaaaattttttttgtgtctttatcacaattgttgaacattgtgaacacgtagtgtttactgagttgtataatacgtgtaagctgtgttcatttgaggctgttggattgctaattaaaacttagatttatccattattcaactcagtgtttctttgccgtgtcactagctatacagaagggccatctcaacagcactggatttgttcttctcctttgtactaaattgaatgtattaccaagctctattacttcttcctctgttggtctccagaatagagccccgaaattcctgcttgctctcgcagtcctcttcaaggctttcatccttgaattactggattttggcatagacttttaactggtttctctgcttctggttttctaatcccctgcagaaaagttgttctgaatttgtaggttcgtggtactaggtacattataaggttgaaggacattcttcttggtgggacgttagatactttatttgaatatttattgggaatttcaatgaggaaggaatattttattgtttggtaaaacagcctgtgaaattcaactagtttctttctccatgtgccttctacaatttagttgtaaaacgggcctcctggtcctcctttaggtgataaaagaaaatatgaaggacgggtgcgcagtggctcacgcctgtaatcccagcactttgggaggccaaggcaggcagatcacttgagttcaggagtttgagaccagcctggccagcatagcgaaaccccatctctactaaaaatacaaaaaaattagtggggcatggtggtgcacgcctgtagtcccagctacccgggaggctgaggctggagaactgcttgaacccaggaggcagaggttgcagtgagccgagattgcacccctgcactccagcctgggtgacaagagtgaaaactgtctcaaaaaaaaaaaaaatgaaaaagtattggttactttctttgaatgaataaatatttagcagttgaaaatagtacagttaaaatcaatattttctttatagatttttaaaatttttatttgcaaaataaagttagacatttaaaaagagattaaaattatgaaaggttagcaggtggtgttggcaacttaaaagaaagaaaattatcattttacaggactttttcacgtatctgtaggattgttgaattggtaatgattcattttttttctgggtgtattttcagtgaattgctctgtgttttccaggagaataaaaccgtaatctaattctaatttgttgctttttcatcaaaacctctcagtaaacttaaaattattgatgctgagaagtgtgcagtgaaagttatgtgcaaattcccttgcttctgttgttttgcgtctcagacatcactcatccgtctccaacaggtgttctgccagctgtgcccaaacatttcaaatgatttagaatgtttccacacttaccttgtatggtgactatttactataaaaggaattatctggttacatagctctttggcacaggcaaaagaccagaagacagaagagtctaatttgaggcttacctgcatattgtaaagtaggtagaagtggcaggtctcagattgttttgcatgtagcactggtactgataagtgggattttcctttaaccatgtatttttggatgtgtagattgtggcaagaaataatttaaatggagtcagaataattttatttgccctgctgcatgaggattcaatgaaagacagaattctctcaaattttaatgctatttggtctattaaagtcgaggaaaatacctcttatgctttacctccttaataaagaagtaaacaacatgtctttatataatttcttttgtatctttaaaattatttggttagtgatcgtaaatgactgagaacatgtgtgactatattacacttttgtcaagataataaaacaaactttagaacctctggaaattttattattcatgctacttagaaaaaactattctttacttgttattaatcagccaaataaacaagtcttaataggcagcaaattaaataagagtttcccatgctgataaggagggtttgccttgagttataaataatcattgttgaaatatatcattttcaaattgtagttatatgtaacagatactatgttaaaatgtcatcttatagctgataccaaatttaactattgctgtcactttatgacatgccgttattgaactgaattctggcctcagagtacaactccaaaaaccagcaggtgttaagaaatgttgccttagagttgtaggcataggatagaatatgttcatgcagataaatatgattttctttgtagcactgtatatgtttgcattttgtgggcagaataaaactgattaggatctagggaactatctaacactttctccgcatatacatgatactgtattgtagagttgcttattcatggcggtgttcttaaggcactgcagtatcttcagtcgtcaaccttccacaattaaattttgaccctttccctttaactagaaaattataacaattagtcctcttaattctgagaatatcccagtatatgcagagtagtatggaggtgaaaagagatggctctggaaatcagtcggcctggatacatccactcactatttttttttttttttgagacagagttcactcttgttgcccaggctggagtgcaatggcacgatctcggctcaccgcaacctctgctcccaggttcaagcgcttctcctgcctcagcctcctgagtagctgggattacaggcatgcgccaccatgcccagctaattttgtatttttagtagagacagggtttctccatattggtcaggctggtctcgaactcctgcccgtctcagcctcccaaagggctgggattacaggcgtgagccaccgtgtctgcctccactcactatttatgtgacatttgataatctactcagcatatctgttcctctgtgtcttcaggtctaaataaggataataatagtacctactacataggtttgtttgaaagttaaaggaattagtatgtgtatcatgcttaggatagtgccctgtaccaagcaagtaaggcttagatattattttgattcttggttttcccatacctagtaagtacaagctgagaaatattattgtaggaaagtggaactttatagcattgtttctcatgctcttcgtgttaaagaaatggaaatggaatgctgtaaataatttgctcaagattaaacaactagttaatggcagatggctttttaattgtcctgaattcattctgtttttatctcaagaacattccaataattttaatagttgtaaattacatagttgatttcaaaatttctcttctctaatttggaatttaaggtaatttaaatgttgcatatgtatatataggttgtgaatctcttatctgaaaatcctaaatccaaaatgctccaaaaccctaacccttttgagtaccgacatgataccacaaagtggaaaatttcacacataagtacttaccacaaaactttctttcatgcacaaaattatttaaaatattatataaaattacctcaggcaatatgtataaggtatatatgaaacataaatgaatttcatgtttagacttgggtccaaccccaagatttctcatatttgcaaattttccaaaatccaaaaaattccaaaacctgaaacacttctggtctcaagtgtttgggataagggatattcaacctatagtaggaaatatttaatatttacatattcttaagtcattaagaaattctcacttggaaattgtttatatgttttattatttaaaaaatactaaaattaggaaactggactcctcttccatatctgcttctgatccgggatgaaactacttaacattacatgccatagttagtggtagcagattttaaatacatagctgtaaggtcttaaaatcaataatgcattattgatttgcatttccctggagaacatgattcaattcatgcttactgtgtagacatgtatgtgataactaaagagaaattagacgaccatgtgcagttttccttcaagggaattatatgtaatttttgcaaagctctgtggttcatatagggtgttagacggtgaaatgatgatgatgtttatactttttggttagttctagtggtaagtgaagcttactgaaagcagaactatggagaggacctaattacctgcctttagtgattttttttaaaaatgaacttattgccttattgtaatgctaccataatgtttatggtgcaacctgtatacctacattgactggagagattgaatggcctgactgtatgggacacataatagattccagcttttttccgtgacatcattattataacagacttctttaagaatatgaacagcagctgtgcacttttgtgagctttacattataaaccataacagcctgttcagctctatacaagtgatggggcagcttgattcttaacaaatgaagccaaactcagctgtgaaactgttaacagatctagtaatgacataggccccatgtatggaacatttcataacacaacaggggaaaacaggggcaacggccatttagcacattggctaagaaggttttctttacctcttgctcagtataacttcacagaattaatatagaattgcagtttatgtcaatagatgtggcatatccaaagttgaattgtgttttgaaactttgactagatttcccagtttataagtgttccctttaccatccttaaagtagaaaaacaagaactattggtccttgaaggtaaaaaataaaaatgcttattctttccatagagttaataatctaatatgatgatgggaaaaacatctcttggttcagtatccatggattatttaggtgtcagagaagaaatatatctacttcttttttgttgttgttgtttagacagggtcttgctctgttgtccagtctagagtgcagtggtgtaatagctcactgcaacctctaaccctggctcaagggatcttccttactgtcttcttccccagtagctgggactacaagtacatgccatcatgctcagctaattttttgactttttgcagagatgaggtctcaccgtgttgcccagactggtctcaaaatcctaggctcaagcaatcctcctgccctggccttccaaagttctaggattacaagaatgagccaccacacctcactgagttatatttatgacatataagttatatttttgtgtaataataaagcaaaaatcaagcatttagcagagaaattgatgtaactattatggatctacctgcatagttttttacataatatattgacctcatcatacttttttaaaaaattaatactgtgatgtgcagaacaaactatataccttccatgtgtctgttttatctagtagaatagctaagtgataactttgaaataatgtcttttcagggatatttaaaattttgcagagtattctaaacagatcagaattcctgagacgggaaaatttttagatgaatatcttttataattctctaattataaatctaaactcttagaataacaataatcttgcaaatattcatgtactattcttgtcaaaagtagtgagtactgccatggaatgttagtgagtatatttgtgttatctcttacgaatcttttggcagttaactctagtttttcagatctttgtagtttttcgttgaatggagattagttgattcttgtttggtaacattcaagaatataaagtattcgtttttctttcttaatttctcattaaataaggaaaattatttgtagctttacaaaaatatcaaatcttgtttgttaaggaatagtggctctaagcttctgtcagttttaccagtttttatatatcacttaactagaagtgaggattttatgggtgaaacatctaatacatagagtaaaaaactgctttggggaaggtcttataatacagcttcttacggaaggcacaggatcagatttgaaataagctacatacaattgatttttctgtggcaagaattgaaccttaatacctgtttgccaagaatagctgaaaattattatttcacttttagagtttttggccttaatcgctaaattagttcatccagtcaagcaaaaaataaaccaacattaggtaaatattctattccctttcagttgctgtatttggaggtaaaccttgtagtttatgccatgatattcaaaagggcaaatttggtcaggcgtggtggctcacatctgtaatcccaccactttgggaggccgaggcggttggattacctgagctcaggagtttgagaccagcctgggcaacatggtgaaaccccatctctaccaaaaatacaaaaaattagccaggtgtggtggcgagcacctgtggcccctgctacccgggagactgaagtggggaaatcgcctgaaccggggaggcagaggttgcagcgagccgagatcactctgctgcactccaacctgggtgacagagtgagaccccgtctcaaaacatacaaacaaaccccccaaaaacaaacaaacaagaaaaccaaaagggtaaataaaggggaatgacctaattttagtaaaacggatgtgaggtcgtgatttgtgtgtttttgtgattcactttagattattgccactcaaaaatgagagaattgatgtatgaatactaactccagaaggaaattccaaggacaaccatccgtgaactcttttaacaagtgaaatttttagtcaagaaaattttaggtgtaactattagattggcttaacaccctttacatgtgcttatcttgtggagaaggtgattttaagaaactgggtaaagcgaaagactggatagtgtgagtttgtttgggaatattggcaaggaatagcccatcttaaaaaaatagtcagaattctttccagatgcccacgcctttgagctaattggtgactgttgttcatttatgttaatttatgtttgctttagatagtaagatccttgaaagctggagtacttctttgcttgtatacccgtgtgattggagcggagcagatgtttaatacaaatgtgtttgttgattgaagtaaagcgtttgctagacagacaggattttggagtcatgtcacatacctttgtgtgacagtccctgctgggcacgtagtcagtgatggcgaggtaagatttacttacgtattgtctggtctgtcttatctcctgtagcgccagtcctccttacaattttactccattcctgaaaggaatgtctctcctgaaaggaggcctcctcccacctgcaccacctctggctgttcatggccttacatttacctagcaagtttcacttttttcttccattactcatagattcagaccatattatgactactgctgctggtactgtgctaaactactaccactagctacaattcattgactgctattatgtgttaagttctttatatatgctagctcatttaattctcaagatcctgtgatgtgctttacatgggggaacaagttacattccagtgacacacatcagacagggtggagacaagatattcactcaggattttctgactccaaacctctgtccttagcttcttcctggtcatagcttaattcaccatcgtgacaggtacttgcctttctctaactttagttgtgtgcttacagttcaaactcttctaaagagcctttatccataccaggtggtaaattctacagtaatgcaccagaatccctttgagaagccctagatcaaacatgttcagaagcatgaagagatacctgaaatgaggaatgtagaagaaaggccagagtagtaccagagagagcaaggaggcattcatagttctttgagtctgtgaccagaaattctcaggtttccaagccaaatatatgaaagtcaagcacaaaaccagtatttttgcgggaaaacaaatgagtaagtaatgcttttgaggtatctaatccacctcatttgtataaaggctaaaagcaaggaaaaaggaaaaacaaggaacataaaggatgcggcattgtagctcctgtttttgaggaggtcaggtcctttttttaaagaaggacctgcagtttctcttattgaactgtacaaccttgggcaacttcgataactgtttgggctgaaattccctcatttataaatcagagcttttaattccagaatctgggtggacaacagaatcgcctgggttatttctctttttctttcattttaaactacagagatttgctaaatcactatctctgcctggctttgcgtatagatagagagatgagtctggggacgagaggttgtgaggcataccttgccaaggagtgtgggtgttgctttctagctagtagggaggcagtgaatgttttaagcagtttattagtattcttttgtctgcaaatgaaaagtcattcattcattttttaaaattatactttaagttctgggatacatgtgcagaacatgcaggtttgttacatagatatatgtgtgccatggtgatttgctgcacccatcaacccgccatctacattaggtatttcttctaatgctattgcttcccttgccccccacccactgagaggccctggtgtgtgaggttcccctccctgtgcccatatgttctcattgttcaattcccatttatgagtgagaacacatggtgtttggttttctgtccctgtgttagtttgctgagagtgatggtttctagcttcatccatgtccctgcaaaggacatgaactcattctttttttttttttttttttgagacggagtctcgctctgtcgcccaggccggactgcggactgcagtggcgcaatctcggctcactgcaagctctgcttcccgggttcacgccattctcctgcctcagcctcccgagtagctgggactacaggcgcctgccaccgcgcccggctgattttttgtatttttagtagagacggggtttcaccttgttagccaggatggtctcgatctcctgacctcgtgatccacccgcctcggcctcccaaagtgctgggattacaggcgtgagccaccgcgcccggcctgaactcattcttttttatggctgcatagtatttcatgtgtatatgtgccacattttctttattcaatctgtcattgatgggcatttgggttggttccaagtctttgctattgtgaatagtgccacaataaacatacgtgtgcatgtgtctttaaagtagaatgatgtataatcctttgggtatatactcagtaatgggattactgggtcaaatggtatttctagttttagatccttgaggaattgccacattgtcttccataatggttgaactaatttacactcctactaacagtgtaaaagcgttcctattactccacgtcctctccagcatctgttgtttcctgactttttaatgatcgccattctaactggcgtgagatgatatctcattgtggttttgatttgcatttctctaatgaccagtgatgatgagctttttttcatgtgtttgttggccacataaatgtcttcttttgcaagtgtctgttcatatcctttgcccactttttgatggggttgtttttttcttgtaaatttgtttaagttccttgtagattctggatattagccgtttgtcagatggatagattgcaaaaattttctcccattctgtaggttgcctgttcactctgatgataagtttcttttgctgtgcagaagctctttagtttaattagatcccatttgtcaatgttggctttttttttgcaattatttttggtgttttagtcatgaagtcttcgcccatgcctatgtcctgaatggtattgcctaggttttcttctggggtttttatggttttaggtcttatgtttaaatctttaatccatcttgagttaatttttgtttaaggtgtaaggaaggggtccagtttcagttttctgcagatggctagccagttttcccaacaccatttattaaatagggaatcctttccccattgcttgtttttgtcaggtttgtcacagatcagatggttgtagatgtgtggtgttgtttctgaggcctctgtttctgttcctttggtctatatatctgttttggcaccagtaccatgctgttttgattactacagccctgtagtatagtttgaagtcaggtagcatgatgcctccagttttgttctttttgctcagggttgtcttggctatatggcctttttttggttccatatgaaatttaaagtagttttctctaattctctgaagaaagtcaatagtagcttcatgggaatagaattgaatctataaattggtatggccattttcacaatattgattcttcctgtccatgagcatggaatgtttttccatttgtttgtgtcctctcttatttccttgagcagtgttttgtagttctccttgaaggggtccttcccatcccttgtaagttgtattcctaggtattttattccctttgtagcaattgtgaatgggagtttgcccatgatttggctctctattattggtgtataggaatgcttgtgattattgcatattaattttgtatcctgagacttcactgaagttgcttatcagcttaaggagatttgggctcagatgatggggttttctaaatatacaatcatgtcatctgcaaacagagataaattgccttcctctcttcctatttgaataccctttatttctttctcttgcctgattgccctggccagaacttccaatactatgttgaataggaatggtgagagagggcatacttgtcttgtgctggttttcaaaaggaatgcttccagcttttgcccattcagtatgatattggctgtgaggttgtcacaaatagctcttattattttgagatgcattccatcagtatctagtgtattgagtgtttttagcatgaagcgctgttgaatttaatcgaaggccttttctgcatctgttgaggtaattacgtgctttttgtcattggttctgtttatgtgatggattaagtttattgatttgccttgcatcccagggatgaagccgacttgatcgtggtggataaggtttgtgatgtgctgctggattcgttttgccagtatcttattgaggatttttgcatcaatattcatcagcgatattggcctgaaattttctttttttgttgtgtctctaccaggttttggtatcaggaagatgctgacctcataaaatgagttagggaggagtccttctttttctttgtttggaatagtttcagaaggaatggtaccagctcttctttttacctctggaagaatttggctgtgaattcgtctggtcctgggctttttttggttggtagggtattaattactaccacaatttcagaacttgttattggtctattcagggattcgacttcttcctggtttagtcttgagagggtgtgtgtgtctaggaatgtatccatttcttcctgatgttctagtttatttgcatagaggtgtttatattattctctgatggtagtttgtatttctttgggatcagagatgatctcccctttatcattttttaattgtgtctatttgattcttctctcttttcttctttattagtctggctagcagtctatctattttgttaatcttttcaaaacaccagctcctggattcattgatttttttgaagggtttttcgtgtctctgtctccttcagttctgctctgatcttagttatttcttgtcttctgctagcttttgaatttgtttgctcttgcttctctaattcttttaattgtgatgttagggttttgattttagatctttcccaatttctcctgtgggcatttagtgctataaatttccctctaaacacttctttagctgtgtcccagggattctggtacattgtgtcttcgttctcattggtttcaaagaacttatttatttctgccttaatttcgttagttacctagtagtcattcaggagcaggttgttcagtttccatgtagttgtgcggttttgagtgagtttcttaattctgagttctaatttgatcgcaatgtggtctgagagactgtttgttatggtatctgttcttttgcatttgctgaggagtgttgtacttccaattatgtggttggttttagagtaagtgctatgtggtgctgagaagggtgtatattctgttgatttggggtggagagtctgtagatgtctgttaggtctgcttggtccagagctgagttcaagtcctgaatatccttgttaattttctgtctcactgatctatcaaatattgacagtgtggtgttaaactctgccactattatagtgtgggaacctaagtctctttgtaggtctctaaaaacttatgttatgaatctgggtgctcctgtattgggtgcatatatatttaagatagttagcgcttcttgttgcattgatccctttaccattatgtaatgaccttctttgtctcttttgatctttgttggtttaaagtctgttttatcagagactaggattgcaacccctgctttttttttgttttccatttgcttggtagatcttcctccatccctttattttgagcctatgtgtgtctctgcacgtgagatgggtttcctgaatacagcacactgatgggtcttgactctttatccaatttgccagtgtgtgccttttaattggggcatttagcccatttacatttaaggttaatattgttatgtgtgattttgatcctgtcattatgaggctaactggttattttgcccattagttgatgcagtttcttcatagtgtcgacggtctttacattttgttttgtttttacagtggctggtaccggtttttcctttccatatttactgcttccttcaggagctcttgtaaggcaggcctggtagtgacaaaatccttcagcatttgcttgtgtataaaggattttatttctccttcacttataaagcttagtttggctgaatatgaaattctgggttgaaaattctttaagaatgttgaatattggcccccactctcttctggcttgtagggtttctgcagagagatccgctgttagcgtgatgcgctttcatttgtgggtaacctgacctttctatctggctgcctttaacattttttccttcatttcaactgtgatgaatctgacgattatgtgtcttggggttgccgttctcgaggagtatctctgtggtgttctctgtatttcctaaatttgaatgttggcctgtcttgctaggttggggaagttctcctggataatatcctgaagtgtgttttccaacttggttccattctccacatcactttcaggtataccagtggaacataggtttggtcttttcacatagtctcatatttcttggaggttggaggctttgttcattccttttcattttttttccctaatcttgtcttcacactttattttattagttgatcttcaatctctgatatcttttcttccacttgatcgatttggctattgatacttgtgtatgcttcacaaagttcttgtgctatgtttttcagctccatcaggtcttttatgttcttctctaaactggttagagagcatgttgtcagatgggagatgaagtgcgtgttttcatcctattctctctctgaccaaaccagagactggtttattccttggagcccagaacagttctcgctcattactataccttagctttcctgattcttttctctccgtctaacatgttctcaacatttattttctactcatatacttcatggctgagtgaaaagagtgagactgactgcatttcagatcttgactatacaaactctgcagctttggctagattattaaactttctacctatgcaatgcatatcattaaggctgccacatatggctgctcagattgtgcaatgcacatgccaaagactctgtttacatagatttcagtatgtggaatgcacaaccacctttgcagaattgtgatgagaattagatgagcccataaagagactagttaagcataatgataaagagtgggacttgagagcctgcggtcctggttttataactcagtctttctatttatgagctgagtgatcttgggcaaataagctgtatgatcatatttatattttctgtgtctcccttttagttttcttttttaaatgatggagaccacaatatatatctcaaaagggatattctgaagatcaaaagtgttaatatttataaagcacttagaatagttcctgatgcatactgaacacccaatatatattagctgttttgcttattgtatgaaaattatttaacatgatgctaaatgctcttttactggtaattcttactactgttattattattatataagacttacccttcacattcacagtctgtctccattaggtctttcctaacccccttatacttttaatctttccatcattagacttccaaacagcaagaattgtagtgggtgtatgatttagcttagaacttatgttgctttatagtatgcatatttctatctctgtagttaaactggaaggcacctgaaaagtgggaatgtgatcagtaccgttatggtgtttagcatcttctgccttgcctataactagtgttagctgaagatgattcaatttctgtcaactgctctgaagagagttgcttccttcagggcttgaggcttgagaactggagaagacagcagaaactgtgtttcatgatctccttttttaaggactttatatccatgtgattacttaagcttaatatacacagcagtgaaaaatgaaaattaattaaaatctaggatgtgtagtcagactagcagcagtaggagtttagaagagagtcatgtgtgtaagagctgagttacagagaagagtcttcctgtgggacatgccttaaatagatttgtatgtgtctagatagaggtggactggaccttcagtcagtgctaataatgttaatactaatagtcaatactgttactaatcctaagagcaaacactagcaggtgcatgctatgctaggcattgttcctcatgctttacacgtattagcacatttaattctttttttttaaagacagaatctcgctctgtcacccaggctggagtgcagtggcacagtctcggctcactgaagctctgcctcctgggttcaagcgattctcctgtcttagcctcctgagtagctggggttacaggtgcacgcccccacacccggctaaattttgtatttttagtagagacagggtttcaccatattggtcaggctggtctcgaactcctggcttcaggtgatccgcctgcctcggcctcccaaagtgctgggattactacaggctttagccaccgtgcctggccaacacatttaattcttgcaataggtctctgaggcagcaaatactctttcctcattttataaatgaggaatcagatgttgccaatagattttatttagttgtgtttgtgattacaagttatactttattttttaagttcgcaataaaatgaaaacctttacaaattcttggtatcttacgttttgaaattatagttcatcagtagttttaaaaccaaacatgccttgtaatttctttctacgtatttaaagacttatttttagaagagagttttaggttcacctgtttgtttcttttttttaatttttaattacctttttgtagagatgaggtcttgctgtgtttcccaggctggtctcaaattcctggcttcaagtgatcctcccacctcggtctcccaaagcacatgtttctttttaaataaaaattgtttttatgataaccccctccccataaagacataatataattattaacaataacacaaaaagataagaggcttttatgttttggaatgtggggtagcttattttaaccttcttttttaattgaggtcagcacatcagattttaatggtttcttgtttgtatgatgaaaactaactggtaaagctcatctccagaaagaaaaaagaacagagtactgagtttgtggaacatttatagaatagagttctgcatttaatttctagatacctgggtgacaataacagaccagaatttactttttaacaactttaacagatttagtgtgctcttatcatactttataatatgaattatggatcattggcaaatcccatcagtagtatttttggcagccctttgatggaagtagagtttgatttttactgtgttgtttaaagaaagaatttaattttttttttaactcttcaaaaaggctcagtttcagtgtaattgtaactacatctttttctaatgggctttaggtcgtattacttgtgacatcaaagaaaactgcatattttcaagtagaaatataaattaagaggtaactaaagatgaacacaggcatcattgtggtaaaaattgtaaagcagtcttttaaattgtagattactatgttgatacacacagcattcaatgactgttactggtttattcatttggcaaaataacagataatcaatagggcaagtgttgtgagtcctctaattggggccatatttcccaggctatttacctatctttctttcttctcattcacagatcttgctggggattagtgttaacaatcctgtgtttgagcatgcctgtgaaactcgatgcctcacctaggaggcctgccttccatggcggtatatgaggtgtgactataaagtgtgagactggtttccactttatggacacactgtgtacagagagtccacctcctgtttcgtgtttttttttttttttttttttttttttccttttgcaacatgtgtgtgggagaatgtatataagaattttttgtggctttttctttttgtcttttcattttcttataagactttaggatgtttaaaatgagctctattacttgtagtgctgtttgcaatttcatgtgcccttttttctttttcttttctttctttgtttccctcttctttcctcattgtttgcactgcaactttaggtaagaaatatttttcttcgactggcccacctttctactgttcctttagctcctcacaggaatgcatcagatggtcttgtgatcattcatttttatgtaagtctcagagacaacatataacttcagttaatgaattaaagtatttcatcaactctgagatctaagatacatttcgctttgagatctaagatgataaatgttactgattgtaagatgtatctttttcaaatatgttaaaaatgtaaaaaatacaggtttttgcatcggtgaaatatggtaacctttttattaggttgtatacggtgggttatcactcatatttgatatgaaataagaagcgtagatggaatcaagatcaacatgtgtgttgatttgtaggccattattaactttggaaactgactactatatatattcttaaaaatatatggaataaaaggtaaaaaaatgttttctaattctcagtccatccatcgtttatcagcattctactgagaaagcagaataagcaataatagtgttctatttggatcattcacatatgattaatacaacatggtggataatatcatgacctttaaaataaagcagacttaagctctagcatgtatctgtgagaccttgagcagattacttcatttctttccgtttccttggataataagcacaccttccatacagagctgtgttgatgagtaaagtattacataagtaagacattgtatatactgtctgggcatatggcaggtgtattaccttgctagggttaccctaacaaaatactgcagactgggtggctgaaacaacagattaactttctcacagttctggaggctggaagtccaagaacaagatgtccatagggttgggttcttgtgggacctctctccttggctttcatttggctaccctttgctgcttccttctcatcattgtccctctatgagtgtcatctctctggtgtctccttctgtctcctaatctcttataagaacgccagtcatgttgggttagggaccaccctaacagccttgttttaacataattacctctttaaaggctttgtctacagatactgtcatattctgagacttcatcgtatgaattttggggagcacaattcagctcataacagtaggtccacagtgttagtcgttgtttggaaatgtgtatttcttattatgaggatgctctcatggtgtctggtgtcataattagtagtgtgggtaacctgtatctctgtactctgaaataagaggactcaggctggagtggtcaggggctcatatgagtacattagggctttaactagggaatgaggatggtaatgcaagtttaagcagaatgattacaggtcaggagttataaacaatgattaaaatcttgatttggaatgagcatggtatagttggaaacacgaggaagctgatttggctggaaaagagcctgaagtgtggaagtcttgagaaggtaggtgtcagtaggataagggagaccagattttagggttgcttgaaagccacgaaaaggtgttttaactctatgatcctagtgatggggagtccatattaaagattacagaactggagggggacgcagaaagaattttgggatttttagtctacaaatttctttatatttttagtataaaaagtaagcattcatttacacatgacttgtggaatgaaataccttttccaaagcattttaaatgatcctgttagtaatccatgataatgttaaggtagttgaagtattacagtcttatgagacatgtagaacaccttgaaacaatgtgttcaaattattcccacctcacctctgcctttgctttctgcctgataacattgtaaagtaagaccccttctccgacccagtcaggatggactcattggtaatccatgagtcagtaagcattttgcagagattcctcaaagttgaatattactttgggtttattaaaatatttcttacttctcacatttcttttacatatttttaccattattattgtctgagccacattggctatctttataaggacagcattttttcttgaaatgtaatataaaatttcattacaaaatatgtagttgggttccatttcataaagttaatttacttcacagagctttggaaatactttggccagtgaagtttttgatctttgattaaaatgtcaggtaataaaaatattatgtgagttgagatatatctgaaataagatctagggtagagagtatgattttagttgcaatttggtaagttttgtgcattatttattatttttgaaatctccttaaaagtaaaaaattaaaaggtcaatgtgagaggccctttaaaaattagtgttcaaagatttaaatgttaatcgaattatctgcatgttttcagtgtcaaagtaaaggcataaaatcctttgaattattgtttaaattgagagttagtgtcaacacatattgaattactgcatggtcctaaagaccaactcctttatctaattagaactatccgggatgcttttgtctctttttaccaatatgaaggtccaaaaatgtagtaaatcttcatgttttaagatggcagcttttgtcatgagttatcttttaaggaaagtcaaattatttcgataaaagaaaatgtcctatctgtataaccagtgctctgtgaaacatctccttggtacagctgtagtattaagactcttgtttatcataagcataatttcacagcataaatctcctgtatactagaccctttaagagatatttatcttcagacattcttgttttttcctattctttatatcaatgagccattttcagggactacccagagatggtaccatcggtttcttatatagtcataagtcatgtgtttttggaataggtgatagtaatgttagagcgtaacagaagagaaaaatatttggcattctgaggtaaattaggtctaagggtctgctttaattttaaaaacaaaagctctactgtttctagccagaaaaccaaatatcttggagtttaacatggaaaatgtttatagtgttgtatagttttattactacagacagaaggaaaacagtttattgagtagctttcagccaataaggaattttatacaggctaacaatccagaggtgtatgaaaaatatatatatatatattttagtttagagagaattaatgataaaagctcaagatattgagccacttactttgaaacaagtgtgatcctttttggcatttatatgacagtagacaactagccaagcagaaatgttttgtgaattacagatttgtccttaagatgaaggggcatgcccttttgtacccttcttcattcctgcttgctggaatgctcatttcatggctcaaactcaagttcatatcttgaagcaagtgctagaagtcacatgttaaggctggtgaaataatggtatagaaggagcttgagtctttcagaattgtggagttgccttaacagacctgtctgttatctgtggattttgtttagaatgagagcgagccaaacttttgtttagcactgcttttttaggttttcagttactcatggtggaacataccagtgactgatccactgtccctccccagctgtatctggttcaggagtcagtaaatgatggtctgcaggccaaatctagcccaccacctattatatatacaggaagttttattgaaattcagccaccctcatttgtttatgtgttgtctaggacaatggccgtttttctgctacagtgaagagttgagtagctttatcagagaccacatggccggcaaaacccgattctttatagaaaatgtttgctgatctctgaggtagtctattcactgatttcatttgtctttctttgaaaatgtctcttttatcattctttttttctgtattcatgctgattccttatcagggtacatatttttgcctcatatttaaactactttcactgctttattaaaagcttccttaaatcatttgaaattccattatttatctatcagtcatactataacatggcaagctttcctaaacagagtttatgctgtgtcactcctgtaatcaaaaacttgcagtgactgtttcctggagcattaggtcataacatttttgcttgccatttatgattctctatgttctttccatactcaagtgtgctaacattatttcctattcgtttataaattagtttatttaacgtactttaaaactttttatttttaatttttatgaatgcataatagttgtaaatatttatgggagtacatgtgataaagcatatgatgtgtgataaccaaattagtgtaattgagatatccatcaccttaaacattgatcatttctttgtgttagaaacatttcaattttacttgtctagttattttgaaatatataataaattgttcttaactatagtcaccttattgtgctatggaaacatagaaactagattttattctttctttctttcttttctttcttttctttccttccttccttccttccttccttccttccttccttccttccttccttctttccttccttccttcctttcttttttcttttttttgacagtcttgctctgtcaccgaggctggagtgcggtagcgtaatcttggctgactgaatcctccacttcccaggttcatgcgattctcttgcctcagcctcttgtgtagtggggactacaggcgtgtgccaccatgctcagctaatttttgtatttttagtagagacagggttttgccatgttggccaggctggtcttgaacccatgacctcaagtgatgctcttggctcagcctcccaaagtgctaggattacaggctagatcttattctttctagcagtatgtttgtacccattaatcaacatctcttaattttttctctccgctacccttgctagcttctggtaaccatcatcctgctctgtaactccatgagatcagtttttttttagctcccacatatgaatgagaacatgccatatttaactttctgtgcctggcttatttcacttaacataatgtcctccagttccatccatgttattggaaatgacaggtttcattcttttgtatggctgaataatattccattgtgtatatgtaccacattttctttatccattcattgttgatggacacttaggttgatcttggctaatatgaatggtgctgcaataaacatgggaatgtagctatgtgttctgtatactaatttcttttattttggatatatacccagcagtaggattgctggatcttgtggtagttctagtttaagttatttgaggaaccttcatactgttctccataatggctgtactaattcacattctcaccagcagtgtactagcattctccttgctccacattctcaccagcatccattattacctgtctgttttatataggccattttaactggggtagagatgataactcattgtggttttgatttgcatttttctgatgattagtgatatggaactttttaaaatatatctgttggacatttgtataccttctttggagaaatgtctgttcaggttttttgcccatttttaattggattattatcattatcattattcttaatatttgttgttttgcttattgagtttgaattccttgtatcttctggttattaatcccttgtcagatgaatagtttataaattttttttgcattctgtaggatagctctccactttgttaattgtttattttgttatgcaggagcttttcagcttcgtgtgatcccacttacctatttagctttggttgcctatgcttttgaggtcttacacaaaaaaatacttgccccgaccaacatcctggagcatttccccagtgttttctgatagttattcatggtttcaggtcttacatttaagtttttaatccacttttatttgatttttgtatatggcacaagatgggatcttgtttcattattctgcatatgaataaccagtttttccagcatcatttattgaagagactgtcctttccccattgtatattcatggtacttttgtagaaaatgagtagactataaattgtggaactagttatgggttctctgttcttttccactgatctgtgtgtttttatgccagtactatgcttttttcattactatagtgttgtaatataatttgaaatcaggtaacgtgaagcccatagctttgttctttttggatttttttcgctattctaggtcttttgtggttccatgtaaattttaggattgttttctctatttctgtgaagaatgtcattgatattttcatagggatttcattaaatctgtaggtcgctttgggtagtatgtacattttaatgatactgattcttctaatccatgaacatggaatatctttcaattttttgtattatcttcagttttttcataaatgttttacagttttcactgtagagaactttcacttctttggttaagtttattccttggtattttatctgtagctattgtaaattgaattcctttcttggtttcttttttagattgttagcttttagcatatataaatgctactgattttggtatgttaattttgtatcctgcaactttactgaatttgctttttcagttctaatagttttttggtagaattttcaggtttttctaaatatatcacctacaaacaaagataatttgacttcctccttcacaatttgtatgtcctttctttctttctttctcttgtctaattgctctggccaagacttccagtgctaggttgaataagaatggtaaaagtggatatccttgtcttgtttctgatcttagaggaaaggctttcagtttctcccttttcaatatgatactagctataggtttggcaaagacttttttcttctatggctgtgtctgtgtcccatagcacataactcaacaatgttgattaatcactgatgaggacttgaagagtgctttgttaacacagaaagaatctttcttcaaataaatctcatcagaagtataatatataaaatggattaaagcggagatgccatttctccttctaagtctccactaggatttgttgaatccctagggcctcatgggaaaccactgttagaatggaaataacattggcttttacaacaggttagcagtgtttttcatcaggccctgcctgtagctgtgggaaaaccatttaaccacttggagacttggttttcttatctttgaaatgagagttttgtcttaaacgctttcagtgttcccttctagctatgttagtatatttaaatgtttcaggtatattccaacccttggtcttcacacaaatggtattctcctaccagagtacccttgcccctgcctattctaatgctgaatttctttcaagaccatgctgacttctaactcatctaagaaatcttctgctatacctctgtgttttgcatctatcactttattgtccacagcacataaactagaacttgatgtgcggagcttcccagtaccactcagattcatatattttagcaagtggattagtcagacattaacccctacctattttgcttaccttaaatatcctaataattaaaataataagacacattcttgccatatgtacgttatttaccttatgaaagttatatattctattggaacactgtacatagtatcttttgttgtcaccttagttagctttatctgcttacctacagagttctcatctcatatttcttgtgtatatcgttgtattagttgagctaacatatatcaaaagcctggcacatagcagacattccaccaaacttaactctttttatggcatttcttataactggagaaatctaaggggagctccccatcctccccactccaaaaaagatgtaggtattccaaagactccatgcaaatccatttgttttctggcctgggttatataagatattccaaattgaagttacaaagttataagctattttttgctttgtctacaaatttattttctcccagtttaacacattgaaagagattggagaaaacatagacaattaataacttttgttaaaggttttcaaatttgaggccctgaatttatctggcagtacactgaagaagtgttcttcctggtgaatgtgtttcaagtaaaatatattttgatttagactgaaagagtaaattgtgtgtgtgagagtgtatgtgttctcatgtttacacatatgcacaggagtattgatatgataaacacatcttaaggcactcaacagctctgatcagtatttaaagcaacaacactgtgttccaacagtgaaacatttgtggaattggaaaagacaaggaaacattggaaagcaagttcatttgcacatagggaaagcattagccaggagagcacttagagagaatggacatgccaccatacagttgtaaaaaaaagattttgaatcttgcaacacagagctgtggctttgcatacccttagtttaaatattgacttttgaaatgggatgaaagttgatatatgccatgttgtatctttctcaccacatgttaaagtggcaataacacaattttgttggatacttagtactgtgttgtttctgatttacagccctggtaatttttcttgttctgggaatacactgcatgagaacacatgttggagctaaaattagctttaaacctacctaagtgaaagtgagaattcttctcatataacctacttataaatatttaaattgtaaaatgttttaattgcttttctctaaaaattatcagaagaataaaaaatataatgttaggaacaaaaatagcatcaggaataattgcagtgaatgatagttcagttttagaagaaagtagaacatttaagtacccatggaaaaactaatgtaaaatttttgctataagaaaaagacatatgactgcttattcaaagtgcaaagaataaagaaaaaaatgcagatttaaaaattggtcacaatacttttttcaatgagaaatccattatgaagtggacgttctttaaacaatgaactctatactcaactctgtggaaaatcttccagtaactggggaattgcatagccttcacttgcctatgtctatatttgtaaatattctcaagagagtttaggacttaactttcatgcctgaaatttttttttcattttactggctttaatttaaactacatcagagttaaaaacctaagtttgatgactaatattaggttatttgaaattgttgacaagtgcttgatatggtagatttatacaggaaaattttcattaacacaactagctgttccctaagaggtggtatggagcagttagggaacaaattctggaagttctatgaagagagagacggtccttggggaaatattagcctgtaatggaacaattattttaccttggagttcacaaggggaagcaagacaaccaagtgtttgagctatttttatataatactcatatgtaggaaggagataggaatttatgacaaaatatatccaaagttgttgtatattcaagttttctaagtttatggaaaaataaaactatggaattaagggatagtttcctcacatatttttatataagaaagcctttgtaaaccttttgtgcactctccaactctgctaagtagaagtagaaacacctttaacatcttcttagggtaatgattgatggtatttgaattgagaaggctgcatacaaccatagccgttcagaaagtagggattgtcacaaatacgaccctgttgttagagattattatgcccaccaaccacatttattgtaaagtaactttctgtaactgtattctcttttcttctattatagatttccctttcctctcctctcctcccctcccctctcctctctccttctctttctttcttttttttcttgagatggagtcttgctctgtcacccaggctggagtacagtggcatgatcttggcttactgcagcctctacctcctgggttcaagcgattctcctgcctcagcctcctgagtagctgggattacaggtgcacgccaccatgcccggctaattttttgtatttttagtagagatggggtttcaccgtgttgaccaggctggtctcgaactcctgacctcaagtgagcgcctgcctcagcctcccaaagtgctggaattacaggcatgagccactgcgcctggcctagaatagataactttgatttacaagtgtttttggccacgtgaaagagattttttttcttcacttaataaaacagtaagaatacgctattcatgtcatagaactataatagcttaaaataaataatatccagaaagttattagagaacatgagatatggcacattctgtaagaatgaccattttctttatctcactttgaggttatcttcttgaaggcagtgataataacattttggtagtttgattacttttcccgttagttacacaatataaactatgcttgtaactttacattcagggactttttctttctttttctttctgtcatctttggacttccctagcatctctccagacatcattacttaacaatactttccttggtatgtatgctttatttgctcagagatgaaaaggtagccaaagactaaagtgattaaagctttctagtaatggtggctgcatctgcctcctgtcttcctcactctttatggcaagatctcagtgaggctgcacctggaggaacattgctcagctctgggatgtgataagtaaatagttttttttgttgttgttgttttttttaatcatggagcaagcttaagaaagctatttttatgtgttgtagtttaaacatttttaaatgaaaatggtatattgaattctggggaaaatatgtttatttaacaattagtctatcagacagccgaatgtcaatgagaaaatttgcactgcttgttaaccacttaaatgtgtttatgggggaatattggagaagcagcaaacccaaagtgagtttatacttcttaatttagttttgacgttgacccttatgctacaactttccaaggcaggtggcaggaacacagcctctgtgcctccgatgtttgagatagctccaggctctattctctgttactctgtaacatactgactcaatgagaatttcaggtcgtggtgagtgagttttaccattggtagcattgttattacactcttattttgtgttcccaaggaatgtggtctttttgtataatactcatatgtaggaaaaagatagggatttgcctacatattctcatgtaggaggacgttctttgccatattccctgggatccaactctaccctgtttctgctgccagatttccgtgattttctattcacaattcccagctttaccctgttccttttttggtggattttccagaagttagataggcatagtttgtctatatatcctgagtttactttttttgttgttttttttttgagacggagtcttgctttgtcgccaggctggagtgcggtggtgtgatctcagctcactgcaaccgccacctcctgggttcaagcgattcttctgcctcagcctcccaagtagctgggactacatgtgcccgccaccacacctggctaatttttttgtatttttagtagagacggggtttcaccattttggccaggatggtcttgatctcttgacctcgtgatctgcccgacccggcctcccaaagtgttgggatcacagctgtgagccaccatgcccgtccatatcctgagttttctaaatggtccgctgctttccacccatcactgcgatcgcagtctgtcatcaagatgcttgtttagaagcctgcaatggctgggctagtagattggactgtttgttctgttcagaacctgaagcctttattttaacattgggtagtattctcagaaaatgtgtagctattaaaatgctttttcttctcttttttagcctgacaaagtcctgattattttaaaaatattttaaggatttgaggattaagaatttatgttgttggtggaatggcggagtcagtatagcagaaatcttccttctctgctttatttttctccttaacatttatcactaatacatacatatttcacttgtgagtgttttctattatttgtcttccccagtagaaggtaggcttcatttgggaaggggattttgtctactttgttctcctctgtatctttagttctgatagcagtgtctggcagatggtatttgcctaagaagtatttgtagatggaaatattctaactttgtccaataattatatctttaagtttaaaaatctaacaaagaattaatgatcatagtgttttggttgtcttatgtttccttacatgtaaaaagggtgatactttaaagaatttttaaatgtttcttatacttttaaatggtttagtatttactattcttcagagttataattaaagattaacttcttagttacttataagccaagattttttttgttatatatcttgttttattttaaaaagctttttaaagaatgtttagtagtttactctgacaataattcagcatcttaaagtgctaggatattctattgaatattaattgctgatttatctgtagttaagccaatttcaagatcttacttcagctgtttgtttttcttctcttctcttctcttctcttctcttctcttctcttctcttctcttctcttctcttctcttctttctctctctctttctctctttttctctttcggagtttcactctctgtcacccaggctggagtgtggtggcacgatctcggctcactgcaacctctgcctcgtgggttgaagctattctcctgcctcagcctcccgaatagctgggactacaggcgcgccaccatgccctgctactttttgtatttttagtagagacagggtttcgccctgttgtcagactggtcaagaactcctgacctcaggcaatctgcctgccttggcctcccaaagtactgggattacaggcatgaaccaccacacccggcctgttcatttctgttttaaagttttttttatttttaatttttatgggtacataaaagttgtacatatttatggggtatatgtgatattttgatagcatcacacaatgtgtaatgattaaatctcagtaattgggatatatatcacctgaaacacctatcatttctttgttttgggaacattccaaatcttctcttccagctattatgaaatatgcgatgattgttgactatagttgcttcatcctgctactgaacactattttttttatagccctttaagttacatttttttggatgaactctttaaattcattaaaatcaactacccactatttaattgctcctaagacacacagtcttaatacattttacagtcactgaatttgggatttgtcctaatgacatcatacaacaattgaagcttttttccctttcagtgctacctaaaatggtggtgcagcaatatcaataatgatttttacatttgatgaattacttatgtttcaatgttttggaaactggcactcagtttcagtacttgtgaaataagagaactggaccatgaaatacgataaataaaaacaacttttttccctctagtaatggatgtgttttagatgagttaagtttcacttgagtggaaaaaaatatgagtaggtctattgcttggaaaagagtgtatcccattggcatttgacaacatatgtattaattgaattaatcactgctaaaaataaaacctactaagggtatgttattattttacttgtcactttaaggaaaaatagttcggtctcatcatctgtcacccatgtcagttaattgtagtgctaagtttcatattacaataaaagtgtgatggttaaacatacaatattttaatttaattcagaggtgcctcaattgcaggcagtgctcactctctacttctcttcctgatcttagcttgtcatcataaagatcaaatctaataactctttttcctcttactgcttatttattgatagacttactcctttaaatatttaatattactagaatatttaagatttttaaaataaaatatgagctttttaagcatctagtatcttcatctataaatttcaagattaatctaaattttattagcagtaaaatatctcattaaatacgtttatgaccatgaaattggaagtttggacagtttatttcttatatactcctataattttaaactaatataggtagtttctctccttaaatttttcatgttcaagacaaagatgctataaataaaagttgtagaagtatagtatcttatttaaaagtaatgatgagcctcttaaatgattccaaggccatttaattttgacattacattgtatttatgttgatggtttgagtgatcatttgatataaatttgttctgagaatcaataaaggaaatagaggaactaattattcaaacttaatagtatcattgcaaattatagtatgtacaaaattcttatttacctcttaatagtctgcttattttttctacaataaatgatgcggtaaaggaaaactataatcaattcactggataacatgaactcttctcttctttacagagtattttggggagaataaaatctacttaaaatatataatttgtgttcaatttcttctcttgctagctgtaacattagctaacttgtttatttgctctttaaaaagataactttattatgacttttaaataaatgtatactcattttaatacatttgaaaaacatagacactataagggaaaaatgaaatattcattagttctattacttgatacaaccacagataacattttggttaatttttttttcattacttttcctaggtgtacatacccatacatgttcataatattatattgtatgtgtttctgtaatttgattttgtaatactcttatgttttaccttgaacttatctcaggtttctaaattttactttaaacatttgcataatatttcatcattggtcacttaggtttcttccattttttttttggtcttataagtggatataattatcagtgaacatgacagtggaaagagtacgaactttagagtcagacctatgcaagtttcagctctggatataactgtttctggatttgtaactttatgctattcagtttctccattcataaaatagagataatgctggccttaaattatttaaatattagaattattatggtaatgaagcagggtattttcttgacaccttcaagggactcaggacaggggtgcctcatttattcagcctgcccctgtctaccccttgtgagagggagtgtgtgagcaaacgagtgctggaaccagagcgagtgcttttgggtgttggcaggaacaaactccatttacttggctcaccatgctcagccccttgtgggagggagcaggtaggcaagcaaatatgggatccagtcagctgcttttgggcaccagcaatagcaaactccatgtgggtcccgtgacagcatctaggtggggttgcctatgaccccctgaaaccccagagggtgtgttgcagtgctctttcagctctgccatctgtggatggctcaaatcttaacagctcagtgggcctttcacccttttgcatgaggtggctgccctctgccagcgagggcaaagggccagtgtgacagccttttgtatccacactcatggctcctgagctctggtctggtgtccaggaaaaatgaagtcacgtgaatgaattaaaggatggtaactgtggggaattttattgtcaatgaaagtggctgtcagtgggaagagaagctgaaaagggcacagggcggataatcatcttcccatgaagtctgaccatctcctgccagatttttctccgaagttacactgtcaagctgtccctctgaagtcaagctgcttctctttgatgtcctaccatagtcctatctactggctgagtctggagtttttataaacacaggatagggcagggtggggccatgggttgtttaggaaaaggcaacatttgagcgggtaaacagggatagaagttctcactttgggcctcagtttcaggctttgtgactgagggtggggtttcgctgccctttctgcctagaatttctctgcctccgtccctatcagtaacagcattttcatagaacccagttgatagtaggtactaaatcactatcagtatcatgatggtaaatggtagtgattactctttgattatgcagaattcatttactgaattcagaattctgtcttgaaatttatggtccttgctttggataaatttttacaaaataaattactaagaaaaaagtggttacaatgtcgacattttaaagactccagtcatatatccagattgctttccagaatgtttatgtcaattcatgcttccaacagcagtgtaagaatgtgctttttgctgcatactcttgagcactgaatattattaaaaattatactgatttacttaacagaaactcttgttgttttaattttcatttatttgatcaccagtgaagttagtgattatttttatggctgtggttgtcttctgtgtattgtatgatcttgtccattatttaatatttttctttccaatttatacgtgctctttgtattttaaggccattaacactttcttctatttctaaaaatatattatttttagcttggtatttaatttgacttataacatttttaatcattcattttttatagaagagtcatttcaaatatcattttttttcatgctgaatcttatcagctacctttactgactccctgcagcccttgtcagactagctttcaggactcctcatgtatccctcattgccttcccaactctgtcctgaaatcactgatgcaggctgacttacctgttgtctgccttttgtagactccttttatgttcttaacatgatctgcttgctgtatttcttaccttttcctttgcttcacatctctgtgaagactgagtaaagctgtaatacctgattaaggcacagtttagcacttaattgttttattttataattcttttttttcgctaattaggttagtcttcccagctgtattgaaacttgcttcagagcagcgtttatagtttgtacctttgtatgtccccaaatctcctagcacaggcagggaacataataagcattcagtgagttaatttttgtaaatgcagataattgcctgattcccaccactctcccaaacacacaaatagacacacatttatttttacctagcaacagagaagttaagagaaatgaaccgtaaagggtttggaacaaatattttggagtttattgcattctgttttctcagttgtgctctgagtcagacagattacacatagcccaagatatagccaggaaaccacttcactaactgtaaagagccaacagacttcacaaggacgaaacttccagtttgttatttacggtgccacaaaaggtattgggctacttcaggctccaaggtctcctcaggatgtgggctttggtggtggagcaggtgagtaggaggggcatgtgtcctcagccagaatatagataggacgcagaatattgattgggtgtcaaggaggacagaaccattaactctgtccaggaagttgccttgagcgttctcagagattgaggtttttgtctggagacttggataatttagtgatcaaatctgaactcttttcattttaataaataaaatcttaatttccttttgtttttgttttttttttttttttttgagacggggtctcatcccgtcacccaggctgaagtacagtggtgcagtcacgactcactgcagcctcccttcctgggctcaggtgatcctcccacctcagcctcccaaatagctgggactacaggcatgcgccaccatgcctggctaaatttttttttttggtattttttgtagaggtgggatttcaccatgttgccattcaccatgttgccaaggctggttttggactcctgggctcaagcaatccacccacctcccaaagtgctaggactacaggcatgagccaatttgttttttaaaatatcatggtattaaaaagaagatgatattataatacctaacctgttttggttttatttcatgatttctcccaaagatttatagacaatgtcattgaaagaaaatgttttacctttctttctaaattttttaccaggtatctattgctgttttcagttgtttctgtgacatttcccacatataatcaaaatgaggtttagtaattggtgctttttgtttctattaattctatctgtataacaggtcattgaaatccatagtggcttaaaaacacagtaacaattttacgatcttttccagtttctggggtcaggaatttgtgtagggtttggctatttgcttctgggttagggtatctcctgcattttgcagtcaggcagcgactagagttggaatagcaagtggctgaagtagctggggctagtcagacacttctcacttttcatataacctcagggtctggccgtgtggtcccttcacatgggctaatttgggcttcctcatagcatggcagccccaaggcagtcagactgctagtatatatggcagctgaatatttaaagagagaatactgtattacagtgagcaaggtgagagctgcattgacttttatgatccagtctctgaaatcagatagcttcatttatgccatggtcagaaattcaaggtgaggtaatatagactccaaggcttgagtgtcagagttatatgtaagaaacaacatgtggaatgggaaaaatcattggggtcatctcaggaaaatataatctgccacagtccatcctctaaccacaaccacttatatagctctcctacatgcaaaatacactcatttctgccctcaaaccccccatgtcttattccattactgcattagtttcaagttcagcgttttgtcttccaaatcaattccagacacagataaggctccttggctaaggcttcttgaatattgaaagcctttgaattaaggttctttggaaaacctttgaactaaaaagataagtcatctgcctttcacacactaaacattcaatggtggggcaagcataggaaaattctatagttctttctgttcaaaagggggaaaatgagaggctgttatattccatactgactctgaaacccagttggtcatgttgccatttgctgaatgagtaatcagtccatctcctgggaattgttctctgtggtgcttggctcctcctgtttgttctctggtttccatcttctgattcatcattctttttccaaaaaacatgacctgtatttgtagctgataatttcctctgcctttttcttgggaatggaaatttgggtgtccagaggtcacttttaattttgtattgtctttgtttcctttcagttccaggtgttacagttttaaaattttgagggtgtcttatgcatcaatttataatctaccccattagcaaaagccatgcccttacatttttgaaataatcgcttctttaccagagattccctgtgaggctgtgatgggataacaccctgatggttctggtagttaggttgttgagcagaaaaagtcagctacatatgcccttaacatctttagaaggcttttgtctgtcttaaaggatgtataaggtgccatcatattggtgttaaagggttttggtagtcacacccttacttttatttgtaaaccaagtctttctgactatacctggtattttatttttcccttgaagctctttcttattttgagactgttttgttctctggagtgacagggaatgcaaaatagttttattttcaaacccagcaagatgcctttttttttttttttttagttcctctaaattttgctgaatttgaagtttctttgtaaactcatctatctctgtccatgtgttataagaagcaaaaatggccaggcacagtggctcacgcttgtaatcccagcactttgggaggccgaggcgggcagatcatgaggtcaggagtttgagaccagcctggccaacatagtgaaaccttgtctctactaaaaatacaaaaattagctgggcatggtggcgcgtgcctgcagtcccagctagtcagaaggctgaggcaggagaatcgcctgaacccaggtggcggaggttgtggtgagcggagattgcaccactgcattccagcctgggcaacagaagaaaaagaaaagaagcaaaaggaagccaggtgctcctttcggtattctacttggaaatattcttagctaggtagttggagttttattaggtatattttctattttcaacatcactatgggcaatggtatggctattttttttctagtacataacaagaatctcttccttccaataacttaatcctcatttctctgaagcccacacagccatatttcttgaggcccattggctttcactaacaatctcttgcaggcccttctgtcttccatatgctgtccagttccaaggccaatgccacatgttttgagtattttttttattatagcactcacttctgctatcaaagtatgttccagttatctactgctttttaacaaataaccataaaacttagtagattaaaacaacaaaacaattttatcaccttttaaggtttctgtgggccaggatttttggcaggcatcaactgggcaattctagtttagggtctctcatgcatttgcagtcagatggtgtctgcatttggaacagtgacaggctgaatcagctaggtgctgtccaggcatctctttattcgtgtagtttcaaggtctctctagtttttccacattggatggtttggcctttctgccagcatagtgtactctggataagcagactgctaaagtggtagtgaaagacttcaaaaacacattctggtgagtaaggtggtgttgaatgaaattttatgacctgcctttcacacaccaaacatttattggtggtacgagcatgggaaatcatataatatcacatttgtcatagacataagcttatcaggatctaagtagaaagaacttagaacccacctctcaatgtgaggagtctcaaagacaacagaagaagaacatttcgaatgggagagattgtagtggccatctgtattggtctgttctcatgctgctaataaagacatacctgagactgggtaatttataaagaaaaagaggtttaatgaactcacggttccacatggctggggaggcctcacaatcatggcagaaggggaaggaggagcaaaggcacaccttacatggtggcagagcaagacaccatcacacatacatacacacacacacacacacacacacacacacgaaaggtaagagtagaagttgtcatcattttagctcatatgcagtgaattccatgaccaatagattgtgcagaaaatctgtctacttctttgtcttactcactatcatgagaacaacacaggaaaacccacccctatgattcagttacctcccacggggtcccttcatgacacgtggggattatgagagctacagttcaagatgagatttggtttgggagacagccaaaccatatcaccatctttgcaaaaataaaaaaattaaaaagaaatcatccatacttctttgtatccagtctttacaggtcaactccaaagttaatagactgtaggtatagatgttgacagacacagaatcttttatgttaaaaaaaaacttacacatatttttgttttcatcctcaagttttactatataaacatctagtgaacttctatagtatttagtgaatcaaatttgaagttctctggcaaagccaaaattatgactgtgggtggtgcatgttttaagttatatcaggttctcagacatgcagaatttttaagtggcaatagttttaactggccaggtatagaaaccttgtgtttttgtaagaaaagaggaaaaatatccctttaaagtgaagaaaaattacatctctttctaaaatctagctttgtataagtattgacagattgtcccagtgattctcaaaattcatcttttcaaatatcaagaaccatatggttaaacttcataaaaatgaatagtgaaaacttcatttaaggcgacgaatgtgcagctgccagcatctcctttcttcttggccacaccagcttggctaatcttctgtcactacatatgtgggccacgtgtgctttggaaaatgttggactgtttcggatgtttagtctgcataggctggatcctgctcactgcatcttattactccggtttcccctttgctttcagcagcaacactatccagctagtttttgtgggggtaccaggtatgcagcaacttgtgaaaaccaaggagcagaaaactgctacctgcctgaaacacaaatatatcttcacagggctgtcaggagacgatcttccctgtagctctcttaaaaggattaaaggtgatatcaaatgaatggaaaataccagaataagtcatcacagttcactgcaattattactgtacctaagaaagcacaccactttttggcagttgaactggccactgataagatttattcatcacaaaattgaaggcagtgtttctttgtgaattaactatagtttgaatgattttctaaaatataggcaaagcatggttataatagaataagttaagttccaaataggattacttatttcatgttgtagccctaattttgcctcaaccactcaccctctggtaaattcctctgtgatatacaacaggtcctcaagtaatgccttgttcagcattgttttcttcagtgacattgatgagaaaaaaaattgattcccagccaaggcccctctttgtatggagtctggctttctccccatgtccgtgtgggtttcctttaggtacttcaattttcttccacatcctaaagatgtgtgcattaggtgaattggcatatgtgcattgtcccagtcagaatgagtgtgggtgtgtgcgtgcattctgtgaggtaatggtgtcctgtccagagttatttcccgccttgcaccctgagctgctgagataggttctggccacccaaaaccctgaattggaataggtgggttggaaaaattagtgaatgaatgaatacaaatcattgtcaaatcaaagtttgtaacaatatagtctactagacaagggaagacaggtacttaatacaagttgagaatacttgggtattagccgggcgtggtggtgcggtcctgtaatcccagccactcaggaggctgaggcaggagaatcgcttgaacccaggaggcagaggttgcagtgagccgagattgcattactaccctccagcctaggtggcagagcaagactccatcacacacacacacacacacacacacacacacaaaaagtagaagttgtcattttaactcatatacagtgaattccatgaccaatagattgtgcagaaaatttgtctactaccttgaaattcccttagataaaaaattggtagtgtaatacttatatatgcagttaggtaaaatattgctttgggtaggtaaataatggaatttcataaatttatcctttctttttttttttgagatgagggtatgctctattgcccagtttggagtgcagtggcgcaatcactgctcactgcagccttgaactcctgggctcaagcaatcatccttccacctcagcctcccaaagcactgggattacaggcatgagccaccatgcccagcaaatttatcttctattgaatggttgaatttttaattaaatttcttcaagtagttagcatattttaatatttctaatagaaacacgaggagaagctctaccagtggaactcttaggactctcacaccacatgatagttaaatcagtttttaactgattagcttgcctttctgaaatgtgaccagtacttcattgctttttattttcttacaatttaatttagcctgcttagtttatggatgatttcagctgttaaaaaataagaacctaaattgacactaagacttggaaaatgtaacctatgattaggagactttattttccactaaatacactctaaggaaagttatcctatgtgtttaattgaacaatagaaatggcaactgtgcctgataaacgtatctaaatgtttaaaatcatcatgtaaacccatgatgattcttaggttccaatagtttcagtaaatcagcttcacttttcagaatatttcccagttgaattatacagctgtagctggtgaactcttaccagaattacatgctgcaaaatgatatgccctttcagcagataggcttaagaacacagagaacacacactagtggaatcctggtggtcagtcttaggaggaatcagaaagaataatgtaagcaaaatgtagatactgtgttacattttgagtatcttttcctcctaacagattcaaagttacccacaaattataagcaaatgtattccagaatgcacagggagaatacataaaaaacaatgaatctgagatggatttaattgtgttgggtatttccagaagaactcattttcacctaaattatttgagtttttagaggcaagcatttcaagaattgctttcatttttgttattcttaaagagaatttactttagaaagaaatgtatccaaaggtgtattgcctttttttaaaaaaaaacaaaacaaacaaaccaaatattcagataggaattaaacaatcagatgcatgacgaaagtttcaggtgaaatctttatcttccaaaggctgcttatgtaattagactaaaatttaaatttcttactgtggcctaaattagtccttctcaaccttggctgcattatcagaattacatggagaactttaaagaatactggcatctgccttttactccagcaattctgatttcattggtttgggatatgtcctgggtatctggatttttaaaaaagtcctcgttgatattaatgtgcagcacgatttaagaaccactggccaaaaacaaccatgccttttggccaccatctccttatttgacatcatcatgtgtcctctttaccattaaaaaaaatttgtcagccgggtgcggtggctcacgcctgtaatcccagcactttgggaggctgaggcgggcggatcaggagatcaagaccatcctggctaacacggtgaaaccccgtctctactaaaaaatacaaaaaattagccaggtgtgatggtgggcgcctgtagtcccagctactcgggaagctgaggcaggagaatggcatgaacccgggaggcggagattgtcgtgagaggagatcgtgccactgcactccagcctgggcgacagagccagactccatctcaaaaaagaaaaaaaaaaacaaacgaaaaaaaaattgtcacctgaatactaaagattgttcttaaccaaggaactttccattagcagtttcttctgcttggaatgctcttcctacaggtctttacgtggctggctctttctcaccattcaggtgtcagctccaagggctctgctttaagcagacattttctgaatttccctgtctaaagctttgttttcccaaatattatcacattattctgtttaaattttattattgctttttttccctatttgttattatcacattcatttgttagtgtttgttttcccactagtatgtaaagtccatgagagaagatacctgacacgctgcttcaccatcatatatccaacgcttaaaactaagcctaccacatagcagttgctcaataagtgttttttaaacaaatgaataaaaatgctaattgaaaatgattttggtaatattcataattacatcttatttttgccaaaaagttacatgaaatcacatttaaaaaatttgagtagagacctagaatgaaatgaatgtcaacaggcagagaggaagtacacttagaaatgtgatagtctcaatatggaaaatttaagggcagtgatattaagcctgttaccaccacttaaggccctaactccaaagccatattttggtcttaccacagtgtcccatattagaaattgtcatatactttctggttaacgtctcctattttaagaacccaagtatcacctccccctccacaaagccttctctgagctcagtctccaggaagctttattttctatgttgcatgtttatctcatggcctttgccgtattgtaattgtagtgatgtagccaccagtctgtctccctcactagcttttagcctcactgggaacagggattgtgtctagagtgccaggcccataacaggtactaagcaagtgtttattgaatgaaagcataaaataaataagaaatgttccatgagaaggattagaactgctaattaaaattataaaatggatttgtcaggaatgtaagtgagttgaagtaatttttaatagaataaagcaataaaaaacgatatactaagccaattggagggggagggcatggtgttatgcacacttaggaaattaagaaaacattgttggtgccaataagtctgtgcactgacttccaactgatatgtggcttgtcatctgaataaggttttcatcactcacttgggactttttatacattatttactctttttgataaacttctcaatagctgctattcagatagatgcattttccagtaacacctgatatgcattttaaaatgtagcttttaaatggtattgattgccagtaaactcaatgaaaactttcatcagtgtactttgaacttcattattctacccaaaagaaattgtagcagtccttgggcacataaatatttaagaatccctatgtagaggccctattagctccatgtctacttttgtcataattttagcacttaaatactacttaggattgccccttcagattgtatccttcttcaaaatctctacagtactactatgcataattttacctaatagctagatgactaggtttttcaaaaggacagtcatacagttgaaatggacatatttttatcgtgtttttaaaaattacacaggtaattaaacagagaaagaaaaattggtgttcaggacagaaattctgttcaggttcccaaagtccttgtgaaatacaccacagtattgtcatagctttgctgctgtaagcctggaaactggtgtgcgcttttcccttctgcttttaggaggaaacgctaccagtgtcacatttctaagaaggagacagcaagcaatgaaagcagtgtcttgataccagagttacagcatccaaagtagttttccttcttttaatttgaatctgcattctcacatatttggatatagttctgttctggcttaaatgttactgtatagaaataaaggtttacagaaggtcattctgtgaacagaggtatggaaagtctacacgtggcacttcctgtgaacagatggcatggtacgttaagagagcataaggtgggatttctgttatgggcaaagggggaaatgaatctgaaaggacagggcaaggtcaaggtggtggaaaggcctttattctatgctgagaagtttgaaccctctgttgccagaggaggtcttgattaaaaaaatcagcctagtagcaatatagaagattgatggaggagaaaggaaagtggtgccagggagactagattgtgatcatttcagtatttaaagttagataaaagctaagtctgaatttcagtaggaacagaggaaagaaaaggagacaagctccagagattcagaatatactcaagaatctcgagtagatagtaactaattggaaataggggagagcagaagtgagacactgaaatttttagtgtggttgactaagtaatgatactgccattaaccaacaccagagaaaccaaaataagagctgtgtgtgtgtgtgtgtgtgtgtgtgtgtgtgtgtgtgtgtgtgtgtgttggccattgtcaacaaaaatatatatgccctaaattggaagacttcgttctgttccatggtaattattgtgttttcctataggaaaataattttgctgagatttgttcctgtggtgttactgaaagatatagtagtaagggcccaagatttaaggtgagatgacctgaattcagtttctatctatatttctttcgaacattcacacactgggctattcccttacctgctttgaagttcactttcctcatatgaaaagtagggatactttcttattgcctatcccgatgaacaaatgaaagagcacttataaaaatataaagtgccacataaatgtgagtcgttagatttctacagactgttaggagttggaccgtaagagaggttttacccaagcaccatggatcccttagtccttagacatgtttttgaggttcctggactgtattctttcattttctctactggtgttaagtatcaattataagggggcagtttgtatatatttttccaaacataagtatttatataaaacaattattttgattcattggtttataccagttacctttaaaacaaaacaaaaacataagtagtttaattactatattgacatgctatttgttaacattatttcgtctctttattgggtcatgaaaaaaagtttaaggattttctttattcttatgttttctacttttactatatttcctcagctcaattgcacctctgttcttgctcagtctaggactcataccagattgaagtaaattagaggatggaaaacaaaacaaaacaaaactcagagtacattcctgtcagttttcacccactttaaagtaatctcatgaacgtaaagttttcaaaaaccaaaagaattgcttccatccatcttaaagtctaatttaatcaggtcttgacaatgtattttacgtgacaatgttcagatctaccaaagtatagaagtgagatttttcatttttagtcctttttttttcattactctttagttatttttgacaccacgtttcaagaaaatttcaggccttgtcagtcagaatggcaagtagaaacaaccacattttatatgtgaaccaaacaagattaatggatgtttcattcattttttacaaagattagtttgttttatttcttactgtttcctctttttaaaaaatatattttgattaaaaatataaaatggtccgggcgcagtggctcacgcctgtaaccccggcactttgggaggccaaggtgggtggatcatgaggtcaggggatggagaccatcctggctaacacggtgaaaccccgtctctactaaaaatgcaaaaaactagccgggcgtggtggcgggtgcctgtagtcccagctactcgggaggctgaggcaggagaatggcgtgaacccaggaggcggagcttgcagtgagccgagatcgcgccactgcactccagcctgggcgacagagccagactctgtctcaaaaaaaatatatatatatataatatataatatttatgttatatatgtattatatatactatatatgtatatataatatgtatatatgtatatgtaatatatataatgtatatatacatatacatatatgtgtaatatactatatataatatatcatatatatgtaatatatatcatattatatataatatatgtaatatataatataatataaaatatatattatatatacatatataaaatgaataatgatattcctgagctttgcaatttaaatcttccatatgaaagtgtatttatcatggagctgtaaaatagaccagtgtttttgtttttttaatgaattttcagacttaatccacattcctgttttcactgcctaaatttaatctttcagtgatattttctgagctactgccatataattaatgaacagtgaaagtcagtttaaacttggtagacaaatattctcctctcccattgagaccattgagttggtttttgctgagtccctccttcctgggattttcccctttccattctgatgtatgactttagcttgtcttagggaatccaccaatctttgcttctttccttttagctgacataaatctctctggcatggatggtttcaggaccacttttttgaccccccctcgaaagatacttcttattcttaagattccggttgcactgcctaatcaaatatacggcagttttttttttctagacataactatttcataaaattaatagcatattgttaattatgggtatctgtatgaatgaaaatatcctttaatgagtcatttctaaaaaagaaacattgagaattcagctacacctttataatgaaagaaaacagttgtttaaaatgtcagataatgatttatcatctggatattagaatcatccagagattaatggaattaaatgttcttatccagtctcttgtcacatagacctaatctaatttccatttggagtaattgtagaaatttttgatttagtgaggattaattccttacctgtaagaaatctctacttacaggtatatgatgattttaagaactgcagcctttttaaaaagtagaaaatgcttgaaattatattgcgaatatttattattttaaataacacttttgatattgtccttcatgtcatataaatatacatttagctctaggagaaaaagaaattgaagtactgataatacagctggaaacccacctattattattaaacatgatgagaaatcagtgaagttttaatttttaatataggttcaattagcaacaactataacaaaaataacttgatattctggatgcttttcattcttcattattaccttattttattaaacatagttgttttattattggttatggttatgtgtattttatgcactatgaatttaagatcaatttctattgataaatgataaagtgctttagtttagtttgccatttggtttatgtgatgtcatataaaagtttaaaaagacccattctttgctatggtttccggatttagtttattccatgtttacaacttacatacaacattatttcagttgaaaagaacaaatgacctatttattaactgagcagccaatacttctcatactaataatgggtatgtattacaataaagtggcagcagtaaggttggtagacttatgtatgattttcctgtggggtcctgggagcccaaattatttattacttgagaacaaagaaccttagagttaaaggtaagtgagtctgtatgtgatatgcctaatggtaggtccctaaagtatgaaaaaagccccttttttttgggaaaagaaaaggataaaaacagtttgtagtttacttctaacgaggcacatcctagagtcaattttctttctcctcattcatttacactgagcgtcacctgttccctcaggtgaaaaatgaggactagcttggattattaatattttgcttgtacccattttcccctgaagaatgtctcattacataaatttgtagtattcacaactaagtttttgtcaacaacatattttgaaatcattcacggccgggtgcgatggctcacgcctataatcccagcactttgggaggctgaggctggtggatcacgaggtgaagagatcgagaccatcctggccaacattgtgaaaccccgtctctactaaaaatacaaaaattagctgggcatggtggtgcgtgcctatagtcccagctccttgggaggctgaggcaagagactcacttgaatccaggcggtggaggttgcagtgagctgagattgtgctactgcactccagcctggtgacagagcgagactccgtctaaaaaaaaaaaaaaaaacaaaaaaaatcattcactacttagcttcttgatttcttaacacccaatttcaaggaagcattaaattaaagcattaatgtaacaggattacaatttcagttacctaacattgatctgatagagtattttattattaccaagctaaaagtaccaatataggtatttatcataatcatgaacagagaattagcacattttctttgcaattgaatttttttcccaaagctgcttctccttactaaaagttctattgaaattgtatgggaattcaaattcatcttaaaagctgaaacaatatactaataaataaaatatttcttattccttattcatttatttattagtttatttattcagttaacaagtaagtggctctgtttatgccaggtacaactttcttgggtcctcaaaaacatattttaagctttatttggtcatggggttttctgaaattatatttactaaaagtcaaaagtaaatagccaaatggctaataagcacatgaaaagatgctcaacattatttatcactaggaaaatgcagattaaagtcacagtgaaattctactttgggaaacagttggacagttctttattctgttaaacataaaattagcatattagcagttttactacttggtatttactcaagagtaacgaaaatataagttgaggccgggcatggtggctcatgcctataatcccagcactttgggaggccaaggtgggtggatcactaggtcaggagtttgagaccagcctggccaatatggtgaaacctcatctctactaaaaatgtgaaaattagccaggcgtagtggcaggcgcctgtatcccagctacgtgggaggctgaggcaggagaatcgcttgaacctgggaggtggaggctgcagtgagccgaaatcatgccactgcactccagcctgggcaacagaatgagactctgtccgtctcaaaaaagaaaaagaaaatataagttgaagcaaaaacttgtttatagcagcattattcataatggcccaaaagtggaaaccaacccaaatgttcattagctgatgaatgcataaataaaacctggcatacccatacaatgaaatactattcaacaataaaatgaattattgattcccagtgatgcaggtactaacattaaatccatttctttgatgaggaaactaagtcacatatgtaacttacagtgtaactgaagaaagaagaaaacacagggctgcttgacttcagagtactcaacctctatgctggaatgaggttttgttgttgttgttgttgttgttgttgttttttatactttaagttttagggtacatgtgcacagcatgcaggttagttacatatgtatacatgtgccatgttggtgtgctgtacccatcaactcgtcatttaacattaggtattgtttgttgttttaaagcattaccccatcctttttcttttcttcgtggccgaactttttgaaagagtgacttgattcctgtctcactttccttgcttacctcccaccttctatgaaaacagctcagctgccagtgctttttcttttgtaataactgcttttttgaaatagaatttatataccataaaatttgtccttttaaattgtgcatttcagtggtttttagtatcacagtactttctgaatgttgtatgtaatggcctttttcagtctctttcatatttaatctttccatgacattcgacattgttgacccctcagtccttgactctgtcctcattcagccctttttcattctccttctactgacctcataattgtttttcagtctttatgcccttgtcttccttgacctactttgtaaatgttgatttttgtttacttctcattgtacatgctacttctgagagatctcatgaccttgggagccacctttattggcgtgttgctcataaatgtttattttagtaatttatctaacaaatatttattgtgcattcattatgtagaaggctcagtttagggacttgaagtctatgctgttattgaacctatattctatggggaagacacaagcaatagcaaataacaaggaagtctgcaattttaaatagtatgagagtggtaggctttgctgagaaggtgcactttgaacagggacttgaacgtgaacagttagccatgcagctctctgcaagaacatatagcaaatagaaggataccaagggtaaactggtcagggacatttaaggaatggtaggaggacaagtgggttggagctgagaaactgagggggtccctagtccatgctgtcagagacaagatgaaagaataaagtggggctaggctatatggaccatcaaaaggactttagcttttactctgagtaaaatggggaagcagtacagggctttgattagaagatgaaagtaatctgagtgaggtttttaagtgacttctgttacttctgtgctgagaatagactatatggtgacaaggttcgaaccaggaaaccaagaatacaaaactacttactgaattgatgcagtcttcatctctccaggattctagactagtatatttaaacgcccattgaacatacttcagtacaacacagatatctaaagttcatcatgtcccaaactaaatccatctgctcttcccagctccatgttccaaagttgccctctcctcccaaaaccttgccttggcagagacccagccactcagagaagagccccgcttgactcttcatgtattccttgcccatcagtcaaattgaggattaaaaaaacctttaagttctctttagtaaggtgtatcagttactttaatttaatccactgcttaatttgttagtcctatctttctgctacccctcaatactcaatattaaaattcaagcagttccttgagagaaatgcaggatacagcaaatccgtcctgagtttgtgagtgcactgtttaatccactaccttgcctgggcatgggcctatacatcttcagtgactgctataaaggctttatgtggtactgtagtccagccagacagatttgggctgaatctcagttctagaatttattagtcacatgacttcagacaagccacttagtaacactaagcctcattttctttatttaaaaaaaggtaaaaacataaccatctgccaatgttgtttttagtgttagagataatatttccaaagccccttttggacagtccttgataaataatacttctactccctctagaccacatgcctcaagaagacagaggaagagactttttacattaagcctccctctttgtgttttacagttctgtgggctttgtcaaatgcataatatcattcatctgcaattacagcatcatacagagtagtttcactgccctaaaaatcccatgtttcactgtcatctccttacaaccaccaatctttacactgtctattgtgttgccttttccagaatgccatatagttagaatcataaagtatgtaatctttttttttccccctaaagagatggggtcttgttctgccatccaggctggagtccaggggcacagtcaatagctcactgtagcctcgaatccctgagctcaagggatcctctcacatcagctgggactactggtgtgtgccaccacacctgcctaatttaagttttttatttaattttttaaattttttgtagagacaaggtcttgctatgtttcccaggctggtctcgaacttctggcctcaagaaatccttctgccttggcttcccaaagtgctgggtttacagatgatgtgagccacttgtgcccagcccagtatatagccttttcagactggtttctttcccttggcagttgaatgggtagttttaatggaatcagtgtctagattatccacttctacataaactctttattaatattgatctggctaagaatagtcctttattcataacactctttctcttaccttacaagagaaaagcacacccttatccatcccaaatgttattatggtgcattatcctggagtcatagaaaatttaacattaaaaattcaactaatgcattaaatttgtattgcagtatgacagggtggccgggtgcagtggctcacgcttgtaatcccagcactttgggaggccgaggtgagcagattacctaaagtcaggagtttgagaccagcctggccaacatggcaaaacacccatctctactaaaaatacaaaaattagtcaggtatggtggcacatgcctgttgtcctagctacttgggaggcctaggtaggagaattgcctgaatccaggaggtggaggtcatagtgagccaagttagtgtcactgcgctccagcctgggcaacagagcaagactccatctcaaaaaaaaaaaaaaaaaaaaaaaagtatgacagggtgaacaactgaggacttaattattaaaatatgtaaaaattctgtgaggcagcgagatggaaataaaggtcaagaaaataaatagcaatgtaaatttcagctgccaaaataagtatctctgtgtgttacttaaatacatagtgattatattaaattattgtagatttagatgctattgagtatatttaaaatagctgatgtgttttgttttaaaatgtcaatatttccaatagggtagaaattaaattctttgcaagtacatattttaccacaggtgaaaatttgtatatgtcaatttggtaatgtgtaaatggttacataatttttcaaaattcttttaagagtctgtgaataaaggcagttaaaacctggtaggctatcctactctataaaacccaagtttgtcaacctggcttataaaatccttcatcaccttattccttctagttggttttgttttgtttttaactactttctgtcttacactctaagctccagcaagaaagatctatttgaagttctaagtatgtgttgtgctctttcctgcctttgtcttgattgtgttattcttccctttgcctcactaccttctgcccattctttaggatccagaagtctggagtgaggaattacctcttggctcagatgctcattttcccttctcccatggtttcctcctctagtcttcttgctacgttgttttacatttaacttctattttgtttttctggaattagacctggaaggtctttaagagtaggaactatgttttatctttgcctgttcagcacctatatacctgtgtcgacaataagttaattcattagatgaatattaatttttgcattaagcaaggagaggtggatttcaaatagtttgaaagttaattcttatgtgtaactttttttttttttggtcagttacactgtagaaagttatttttcttctatgctggttatttttctggctgtaatatttgcatttactggtaagattttagtaagctttcatatgaagatgagcctaaagatgattttgagaaccaccattctaacagaaggaacacattactgtaagtaatcaggcaaggtttctagttttggctctgtcacaaagttgccatgtgaccctgggcaaagtaaccagcctgggggttgattttcttatctgtaagatgagtaagtgaccagagtctcccaaaagtttcctttacctttgatttaatcaagagaaaattttagtaaagcaaacaaatgattatctttgacaagaagtaaaaaatatgggctgatttattttctactcatttatactgtggaccttataggtggtatatggagatactatgtatcttgtttatgtcacctgcaaaccatgtactgtagtgtcatggcttggaatctatccttaatctaaaaattaaatttttaagttgttataaatatagaagtttatatttaaactgtaaatattgtgttgagttataattttaggttatattttagcatctttcactaaatatatgatgtatctgattaatgttatactttcctatacatttctgtcattctctaaatgaacttacgttgacatatttttttgtgaccaattacttagtcactgcagcctttctcattgagaagcaatattaaaaaaattacaaaactgctttcctgtgtcatttggattcataatgtgtcataattaagttttataaagcttgattgactgacatttagatatgacttttataaagggtttgagattgtgttgtttggccgaaacaaaggcagtatttcctttcttgtctttgactccacctagccccacttttctccacctacctgaggaaagctgtatttcttcagacaaacttaataattgcccttctgtgcctgatttgggcctcaggaaaggcccatagcatctgtaaagctggcagcagaatggtatttccaggcaagcacagggttgctgggtagtgagccaatccacagctttgtctgagcagctgagaactttgccggagtattaccacggtgttcagtaacacagacctgtgccatgagcaagtaaagcactgagcaagtgtcagggtcaatatttatagaccactacgtagctgccttgcatagagagaaaacgggagagtaacatgcacacagagggcaaggaaagaaagactgcagtggagggaatgttaatttccaattttttctgaaaatgtattctttctaactgtcaggttcagacttctgctgattcataaccatttggctctgagctatgacaagagaggaaacaaaaagttaaacaagcaagcctgccataagtgagaaggtaagtaattagccagttcagtctcgctgttactcgtaaactctctccctgttggctgcactgcatcagtaagcaaagggctgtgtggcatgtcaaagctaatgaggagggctgcctgctgggtaagaatgttgttggtggcagagccgttttgtgtactgctgttgagaatgccgggtacattcacaagacgtttcctgcgtgtggtaggaacagctctcaagcaccaatttcatattgtgtcctatcagtaagtttctgtctcttcattctgtcaaactcgaggtcttccagttggtaaagtcctatttacttttatgtcggtattaaaacattagtgtcagttaagtttatcgtagtgagtggtctagacatggattataagggaaacattcagatgaacgtatgaaggtgcagtagtcagtgtcaaaatgtggaagctgggaattggggtaacatggggtctttttataaaagaagccaacctccatttgccagtgcactgaagtgaaatagtacctttgggattagagagaacctggggtggtgagaagtgagaacagtcttcctaatccacggtgccaaaggcaagcactgaggagaagttctctgcttgtccaggtcacttgctattggattcttaaaaactgcgactccctactcaatctcaaactaaaattaacatctcctcctatgcattaatagttctttttctcctgtcatcacaggtagcactttaaatatgtttctgtgtatgttcacggtgctgtagcatgttcatcttcattatggtttttcatattctggattatcattaaaagcattggcactgaaggagacagaaagaattgttttctatgtattttctggttctagctcatgaaatatatatacttgtatgtttatatgtactacacatggactagaaagtcaattatgttgtttcactagaactgtggccttaactagaggagagttatctactgacataatgaaaatttccttgattgcttttcagaatgtagaactatcagcattagcatgatatttagaactgttaagttaggttatagatggtgattataggtccaaagggttttctgtactacatatttaagttaaaaacaaaaatgagattgatgctgctgtagagctgaaactggacaccattagagatatgaggaaaagctaatactctggcacagattttgtgttagggctgaaatacagaaatcagcccattctaaaataggataagccagatctaaaacaacaggtagaatatgtttaaatgtaaagtaagaattttaaaatgagaccaatagctgtgcagtatcacttttgttgaatgcgtatataacttttcaaatgatgcaaaatgtttcaaaattaattttattacttcagaaataccttaaggctaatctaattgatagcttaaactgtattttaacattcatttaatgcttgttttatcatgtgaatctttgtacttcttccaattctgcctaccatttccattttattagtgggtttgatttagatttttgacaatatctttattttgaaaatacaaccatgattgatctagaatgggcatttcccagttatagaatctaactggctaagttcatcaatcaatttttatttgcttttgcctttgagtaatatctcatgatcaagattgtaatttcagatttttattcagtatcttttattttttgctttatattttgcataaatactagcatgataattgctttcttacccctttttattggttttgtttttattccttctggtgtcttgtttctgaagtaccttgttgaaatttgggcagaaaacaaggcaagcaaataaagaactacaataagaagaaactaaagaaagttttcctttaaatcaagaagaaatacaaaattgtgacactggttgataatgtctacattaggatgtattttgtttgaagactggttgagtgttttaaaacttgaaatgccttgtcagtattatttttggctctgtagtccatcctgacattggttatcatatttataaataatattttatatgcaggtatattatacaaaatgaaaatggcaccttttgtattatgtgttaagtatctattgaagcaatgtgaatgaatttagcttgaaatattaatattagcctcctcatggatctcactgccctagagtcatatttgttctactagtagtccagctgctacactactcctttttttttttttttgagatggaatttcaatcttgttgcccaggctggagtgcaatggcgcgatcttagctcactgcaacctccgtctcctgggttcaagcgattctcctgccttagcctcccgagtagctggaattacagacatgcgccaccattcccagctaattttgtatttttagtaaatatagggtttctccatgttagtcaggctggtctcaaactcctgagctcaggtgatctgcctgtctcggcctcccaaagtgctgggattacaggtgtgagccaccacgcccagcctgctgcattacttttagaagggtcaatcttccaccctgatgaacccattgcttttaatctaaaaccctcccatccctgtctttctactgcttatagataaagaccaggctttactatgagtctcttgttcatataccttctacttttgttctatattaatcttctgccgttccttttgggctgttgtctgtatctctcttgcccatccatgagaatattcccctttctctccattttatttgctggcagtattcaacatctcctatttctcaaaacaatccacattgcattgcttttttcttgtatcatttatgctgttctatcttgaaaacccttttcccaatctttgccttctagcctgaatggagaaagtcctgctggtctaatctcagactctgtgacttggcctcctgtataaatctctgtcccagtactttgcaaagcttggtaatatagtgttttatgtttttgtttctgcctgagactgtaatctatttatggccagatttttaaatttaattcttttatgcttccccaagacctagcatataacaagtgtcccagaatttgaagtaaacaaaaactttatcatacttattttaaacataattttctttatacccctttcactttaaaatattttacaattttgattcattagattgaaggaaagcctctcaagtagatggtacatattggtaataataattaaaaaattattttgtttctttttctaggaccaatcagtgttgtgcgtgtgtgtgtgtgtgtgtgtgtgtaaccatgaaaatagatatttgctgaactcataagtttatttgggtaacaagagtcaaaatgatattggttagcaaataaaaattcaggatacatattccaaaaatgctgtttatgtaattaatttggtgaagtctgtcaaaaaaaccagctagttgctgtggccgtgttgactgctgtggtaaattaagtgatgccctagcaaactaaagacagtgtcatgccttccaaaaggcccagagagagcttcaggagagaataggtccatcctcatgtagccgggagaattgcagaatgaaattgctcccagtattactagtaaaccttcaaatttcatttactggggcagagatagttcgggttttaaggaaataatagaaaatcatggtctgaaaattctcaaacctgaaaggtgatattccatttcaggcagaagaagaagttgctcctcaaaatagaaatgttgaaagagaaggaagttgacgtttaaaaaaagtagttgtgaaatagcagctgtttcttttagctctgatattcaataaaaataaaatttattttgcctttaattgtattttatttgcccatcatacataaaagtacttacattatatatgaaatattgtatatatcaggaacaagtgtaaagcttcatgaacaatttggagtgacttatagttttcttaatttaattatttttactttagtgtgctctaccagcagtttccactactatttaaaccttataaacatcttccagacattgaatatgactcttctgtttgtttaaccttgaattgtatctctgtcttaggaatgaaaacaagattggtattttcataggaaaatttggtaatcttaattgcttggaatggactgtaattcaatttggaactttttttcagatatagtttgcccatataactatcctgtgttaaaaaatatgtggagtggggaggctgagcaggagaattgcttgaatccaggaggcggagtttgcagtgagccaagatcaccccactgcactccagcctggcgacagagcaagactccatatcgaaagaaagaaagaaagagagagagagaaagagagaaagaaagaagtggagaaagtgccttagcaaagagttttaggtatggattttatagatctcagtggcgtatcaaataatataaatattatatgattgggatggtggaagtttctttggtatggacgtagaaatataccaagttcctgttagccagtgaggagggaaacccaagcttgccttagtatggaaagattataacaacaacaaacataagcaaaaacactaccagcagcaccaagaaaagctcaaagaactttgtggttggaatgaggcataaaggattttaccagaacaatcaagtcttattttattattgttagaagttttttgccaaccaaaatttttctgtaacagtgaagggcatataattcatagagcctgagaggagaagagtaaattaattatggaagtgggacttgaaagcttttcttcagtacttccattttatcaatgggcagttgtggcatccataggtaacataacccgccaaacatcagcttttcaagtagctagttaagatttggataaaaattagtattaggtaattataaggccagtatttttttttatactttaagctctagggtacatgtgcacaatctgcaggtttgttacatatgtatacatgtgctatgttggtgtgctgcacccattaactcatcatttacataaggccagtattttattaatgcagcttttcttgtctgagtgtaattgctctgtttttgttcttcatactacatttaattttttgtgtctctgtgtcttgtcttgtattagactcctttgcattatttcttaattcctggaagaattaagatggtatttcttaataccatcaagtgagatggagtactctcccacttcaagtaatttttgtttctaatgacagataccctttctggctctcctgaattgccctattctgtctcatggtacaatcacattctgccacacaaacattcattcaatagaacatggcacatagtcctggagcaaaagatagaagctaaaaaacaagtttcatgcttagattatgtctaagattagaatatagaatatctgtatttcagtaggatatatatggctacattttgttttataattttgtttaaagatgattatttgttctaatttacacctagaaaaacattgtttaaaacaaaaatgaaagaatccaattggcttttccatgttatatttgctttcatctgggattcttttaaaaatttaaataatcgaagacgtagaggggggcaaaacaagtttgttttgtacctgttatattctagtaagtttttgcttctctatttctattcccaccactcccaaagaagttggggctctttggctccatccattcttattaatattaaggtctctggtaaaatttgcttgtatacttagatgaaagaggtttttattgttgttgttgttttataatttcaacttctcttttaaattcagtgagtacaggtacaggtttgttacataggtatattgcatgatgctgaggtttggaatacaaatgatcccatcatccaagtagtgagcatactacccactaggtagtttttctctcttcctaccttccctccctccacctctggtagtctccagtttctgttgttgccatctggatgtccatgagttgccaatgtttagctgctacttaataagtgagaatacacagtatttggttttgtgttcctatattaattcacttaggataatggcttccagctgcatctaagttgctgcaaacgatgatttcattcttttttatggcagtgtagtaccatggtgcatatgtaccacattttctttatccatccactgttgattgtcacctaggtcgaccccatgtctttgctattgtgaatagtgctgtgatgaacatatgagtgcatgtgtcttttgggttagagctatttcttttagatctatgcccagcaatgggattcactgggtcgaatggtagttctgttttacattctttgagaaatctccaaactgcttccacagtagctgaactaatttacattcctactaacagtgtataagcaatgaaagaatttttgaacatatagcagcctcagcctgtgatttctgtaccttcctgtttcctcctccctcatatcagaatcaaagtgatcttcatggttctccatcaataaaaaagcctggttatccctttgtgataattttcgattggattaatacctttcactttaaataagtattacccactttttaaatgtcttgcctgcaaagaaatgtataatttttacatctttgctaatatgatagaggaaagtgatatttaatttacttatttttaattactagtgaatttgagttattaccttttctgttatttataatttatttatatacttattcttttttttccagcagctctattctcttttctggtttagaatgttcctttatttaaaaaaaaattaaaggatcttgattttttaaatatctattagttgcaactgctttcctaagattttggttactttttaattttgttttatgtgttttgaaacataagtatgttttgaaatatttttattaaagctaaccaatattttctcaatatcttttgaaacttagaaagtctttttaaaacctagaaatgggaaaaaatatttttctgtatttttatgtcttaatttaactgttaatactatagtccacaaggatttttctgaccaatacttcagcacttttactgaatcgttctccccctttctcactttttttgtgaactcatttttatcttgtattcttgtgccacaaatttaaatctttaggttacctttcaggttgttttgcattaacatttttatctctgtggaataaagttgatgtttcttgtttaatgagatttaagcattggaacatgttagggtggtggtgttggatttaacttggcgtgattctagaaattactgtagacaagaggctgtgtatgttacttatgttaagccagaccaaataatataatctgtgtgattgagaaatgatgcatgaataaccacctccatttacaaggggtgcctgtatgtgtgtatatatgtatatgtatattttattaatccttctaatagaccattggatgacttatttctatttcctcttttcatgataaagaaactgagaccccaaaatgtaaagtaacatgataacctcacatagctaatcagtgataaggtcatgatttaaacttggatatgaccaaagtccatcttttttttttttttttttttttttgagatggagtcttgctctgtcgcccaggctggagtgcagtggcacaatctcagctcaatacaacctccttctcccaagttcaagcgattcttctgcttcagcctcatgagtagctgggactacaggtgtgtgccaccatgcccagctgatttttgtatttttagtagagatagggtttcactatgttggccaggctgatctcaaactcaatatttatatactaattggttacctggaatgatttaagagggtagtttaatctgctctgaagagatacacttcataaacatagtttgtgtttgtgtacgtgtgggggagttcacatgtgaaagtttataaaaagacatcatttgaaattttaatttttgttatgcatttgcccaccatgaaatattttgttctgttttcctctttaactcaaggcaaacaattttgcttcagtataatataggactttttcctccttgaatcactctgccctttgttgatacattggtatgtctttggtaacaattctgctgtacttcattttgttttatagccctgccctagaacatttaaaattaaattacaccttatagttgataagcaggttgttcttctattatttgtaatattatgcatcagtatttgtattgtcttaaaagtcttaaatagtttatttatattcctcattttccagtcatatttattttcctgctttagtgtaaaggtgattattactgcacattatatggttgaaacataattcagttatggttttatatattcctcaggtgaatatttgctttttctccatgtaaaatacatttttcttaagagctctgtctttctacttctctctataccaattttaacttcatcagtaaattaatgtatcattattcccagtagtagtttagcttactaaccttgaaatttatatctgtgtttattgtaagaggctttttggcaaattgatcttgacaataatagagaaagaaagcatggtgacctaggacacaacgttctactgaaataattcgcagttctttgaatgtgtagagtttttttgttgttgtttatttgttttaaataagccaagatacaatgcatatagtcttctgagttattcattaatacctcacatgtaattattttaaattattattggtagaaacagacaatttagaatgcttttttttctttagccattgcaatataaagttgattggtacagcttgcaaagcacaatgtgagtttaaaatatgtctcctgaaaccatgtgttcttaacttggggagctggttttgtggtcagtttgaagctgttcccatagtgtatgttccttctagttaaaaggaaatgtgatatttgtgctaacatgatttcattgttaatagtccaaactagtactataaattgtagaggtagagaatcaattttaaaattttggttatattttaataaaatattttttgtgacacataagtttctgtttattagctgtgtattgccagtggtattaattgatggtattagagcatacctgagatcaaatactggtttagaaataccataaggcatgtagaacacacagatggccaattgtacattggcgtcctgtaaggccactcatttcttacatttagggcagttcaacaaacaggctgacgtactatgatctttcagacagcccacccacccagccaggagccatacatgttatcactcccctctgtgtttccctcctcccctcccacttcccttcctggttacactcttcctttcttgatccgtcttcttcccggctccttcctttctttcctagtttttctttcacttttttatcttgttcataaatgtcagttgcatctcagcaagtttctgttataccaagttgttaactgattttttttttaaatttcaacttttccttatcttctgtcttctgtctattgcccaattatgttagaaaactctttttgtgtgtgtgcattttgaagaaaatctttccagttgtaacagaaacagtaaatgcctggaagcaagaaaaacatgtgttataaaatgtaaaactgcaattagcatctttcacaatttccctaaagtcatttaccctctcattttataattaatggtaacgtcaacatgtcacggatatttgtatatatgataatagtttccgctgggcacagtggctcaagcctctaatctcagcactttgggaggctgaggcaggcggatcacgaagtcaggagttcgagaccagcctggccaacatggtgaaacctcgtctctactaaaaatacaaaaactatctgggcgtggtggtaggcgcctgtaatcccagctactggggaggctgaggcgggagtatcctttgaacccaggaggaggaggttgcagtgagctgagattgcaccattgcaccaaagttttaatagtcagaaggtagggccgggcgcgatggctcacacctgtaatcctagcattttgggaggctgaggcgggtggatcatgagatcaggagtacgagaccagcctgggcaacagggcgagactccatctcaaaaaaaaaaaaaagttttatttaatccttataataattctatgtgatggctattattatccctattttaaaggtaaggaaatggaagttcaggaaggttaaatgacaatacttacgattatgtaggttggaaagaaagggagataagaaatcaaataccttctgatttttttttttttttttgagatggagtcttgccctgtcccccaggctggagtgcaatggtgcgatcttggctcactgcaacctctgtcttccaggttcaagagattctcctgcctcagcctccccagtagctgggattacaggcgcaccaccacacctggctaattttttgtatctttagtagagattgggtttcaccatgttggccaggctggtctcatactcctgacttcgtgatccacccgcctcggcctcccaaagtgctagcattacaggcatgagccaccacgcccagccctaccttctgattcttaaaactttacagtataatatatgactctcttttaaaataagtaattttactttcctactcctatacatgtctaaaagtttgagaagtagtgcagcaattcataaggctttcacatttaccaggtgtccaaatcagagagcagcaactctattcctacaaggaagacaagagtctgttgatatttacgaacattaatacattaattaattttaatatattattctcatgttattttatatttttctcacttttgtaactctaccagggtttctttatacaacaacagcaacaatacttatgaaaacatgttcttccaaataaatccatgctatactctggaatgttttttgaggcaggtcagattttcaagctttctaatttcagttaacctctaatagactttttcattagtaatatcacactatgatggcatgaatttttagaacacatcattataaaaatagatgttttaagttatttgtatatagttattctgttagctttttacctttgccttgctctgcttttcaggaactctgttaggaattatatgagacagaaaataatattcaaaacaaattctatttttaatctagttagaagaaccttttttcaagatttggcataggagaaataaaagctatggaaaaaataacctttagaaattatctgttgactttttcatgactgttctagccccattatttgtaagatataatttaaggttcttataaattataactcctgttgtaaaatgttttgcattttaaaaggattttaagacctattgcttcttttcaccttgctccttcaaatgctttgaaacaagaatatgcattttatacacagaaaaatcaagatgaagttaagggtgggtgcagatcccagagtgaaaagctaagtgttttggccttgccagaatagttctaaagcttggttatcttaattgcaatatatgaaaatataaagaaataaatacctaatgtgttaacccataccaaagtctatagaaataatcagtggtaggtacaagtcatttaagaaaaaagttatgagagtgttatttaatattaagaaaattttataaatttaatttagttgtttttgaaaactgagaaaagaatttaatatgattatagtggcagaacacctgtattgagcttgtgcaactatgtgggagtttagtttgagagccactgaattatcacataaaaattattaatcagtatatagggtggcagtaatattttcctgactattttaataagctgtgttggtatgtcagtaaagagtttataaggaatacaggccagcttaagtaaactattgaatatctgtctcatactgtacggggaaaagtgatgacagcgtgactatgtagagttatataaactatgtaaaaagtcataaaaatgtgagtggagtgaatttgtcacctcgattttcttttcccttaaccactctactttccttctctctccatctgtaatgctatgcagtaacttcagttttatgcttccatccatggcagatatcatcaagcaatctaacacttattcttgttgaggttccagtaagccttgagtccaagctgccactactacagggggttatccacatggaaagtgcagattgttactactcacctcattccgtaagcagaagcaaattctgtatagatgaaggacttaactatgacagccaatactttaaaatatttagaaaataaatatttttattatcagctaagaatttctttaccaagaccagaaatagagcaaataataaagaaacaaattaattaattcagcaacattaaaatgaaaaatcaaaactgtgttcatcaaaggacactaaaaaagaataagaaagacccaaaattggtttagtatatagaatttattaaagataccatgaatcagtaagaaaagtaaatttggtaaatataaaaataggaatttcaaaaagagaaaatccaaatagtcaataaacatatgaaacatgctgaacctcattaataattaaagaacaaaattaaaactagagtgatgagggttgggcacagtgtctcatgcttataatcccagtgctttggaaggctgagacagaaggatcccttgagccccggagttgatgattgcagtgaactgtgatcactccactgcactgtagcctaattgacagaatgagactctctgtctctcttagaaaaaaaaagagtgatgtatcatttcatttcatacctaccatgttggtaaaaatataaaagtctgaaaataacaaatcttggtgtggatgtgaagcaacacgaactctcattcactgctaatggcgatgcaaattggtacagctgtattgataaattgaaaccgaacataaacatatttttccgcagcaattctacccctaggtatatatcctatagaaatttttgcttgtatgcctcaggaaataggtatgcaattttttaatagtagtagtatacatagtagggaaacaaacaaatgaaagaaatctggaaacaacccaaaagagaacagatctgataagttggaaaatattttatacagtggaattaacatagtaataaaaatgaatgctccccagctacattcatgagcctgcagaatccccaaaacacaattttggatgaaaaaagcaagtcacaaaaaatacatacaacatgattctcattaaaatgatgtagagtttcttcttcctctcttagcaagttgaagttggcttcatggaattgagaaaatatgatatttaagacacagttaaggagtatgtggcaggttcgaacaccagttttcaggatacccttattttctactttaatggtttatctgaggggcccttcatagtttggtaagtggctaaaatggtgggctctgaatttagagatctggagttctgagcctgcctccaccatctagtaactgtgtgaactgtaacaaattagttaacttctctgggcctcagtgtactcatttgtaaagaaggatctttcactgaagaggagttcctctttccgtgtggagaatgatgaactgaagttgagaatctagccaaaagatggcatagtacaaccgagcgagaccaaatgagaacatgaacttaagacagaggcagaggattgcaagacaaaggaaacttgaaagatgtaaaaagagcataaaccaaacagatttgggggacacagagaaggaatagcaacagaacatctcatgttgtctgacctggctaattggctaaatgctggtatgatttataaaaatagaagacataggaggggcccgtttcagggtaaagatgggtactttacatttccttgtgtaagtacaataatctcagaccccccaaattaatcacatctttcatattgctgttattctgtacctgccactgtgtcattcctggaagctatttccatccattccagtgcatggttgttaattgatgtgtgttttctcattactgctggaataggtccttgctcaccccgaagtgacacccttctggtttagtgaaacttccatcctcagttatccactattttggaaccatatctctctaacagcttcatcatctagagcctgattttggttctccattccctccttttggtgttcagtgtcttttgctctcattagttgtcccacttcattaaaagagaaatttcagtagtattgcatttcaaaggaaatggagctgggagtctctgctccttggaaattgcttggccgtatgaaaattggttagttcttcccttagactagctctttaaaacagggtattggaagatccttgctaggcaaccaagaaatctgttaccccttaatccagagcaatgttgtatctttactttatgtcttatgataagaaaaccactcaggtgttcagtaatagctaagaaagatttgtttcagggtgagttttggtgtccaaaaggatcaaaatgggttgacagattctctctcctactagaaagtgttagggtcactctcatgaggcatcggaccatggatatcagcttaatttttcatatgctggatatgtgccttatattatttaggaattgcatttggatggaagtaaagaaactgtaaataattgtagaaaaaactaaaagttatttctctctttttttgtgaaaaacctttaatttatgtcagttgctttttaatctgtacctgattttgttaaatttgttttttgtttgtgtgttttattaaactgttattttagattcgggagtacatgtgaaggctggttacgtaggtaaacttgggtcacggtggtttgttgtacagattatttcatcccccagagattaagcccagtccccaatagttattttttctgctcctctccctccgcccaccctccaccctcaggtagaccccactgtctgttgtttctttcttatcatttagctcccgcttataagtgagaacatacagtatttggttttctgtccctgtgttagtttgctaagaatagtagccagaggtaggcaatcagggattatgagactgttccacagagctcagggacctagtatctctctctttttctgctccgccagcctagcctgtggcttccatcttcggtgacacatatggttcattgtggctgctgtcgctctagctgtcatgtctaatttctaggcagcaggaaagaagtggatgtgagtgacagacatatccatatacctcctaggcaagtaccttccttaagcagcaattcaaaatgtccgccctctggttacattttattagccagcttttaattcaatggctacctcatgatcttttagctggctatattactactctgaaaaaccaggaatctgttgccaaggaaaaagaaaagatggggttgggtgcagtggctcacggctgtaatcccagtactttgagaagctgaggtgggtggatcatctgaggttgggagttcaagaccagtctggccaacatggtgaaaccctatctctactaaaaatacaaaaattagctgggcatggtggcacacacctgtcttctgaactacttgggaaactagggaaggagaatctcttgaacccaggaggctgaggttgcagtgagccaagatcccaccactgcactccagcctgggcaacagagcaagactctgtgtcaaaaacaacaacaacaacaacaaaaaaaaaaaagaaagaaaaagaaaagatggatgttaggtgataactagcctgtcttgcctcatttgttctacttaagatattgatggaactattttatagataagtaggaaaaatggacattgctctttaatcataaatacaatgtgcagattccctattttgagatgtcccctttgaaattcattagccatttaaaaataatttttgctcttttttttcttaacacattaagttaaaatgcagagtttcatacaaaggtttcaatacctattagacaattaaggaactgagggatcaactaagcaggtttctgtctagatgtacacacatatttagaaccttacgtctgtcagaaggaaggtgtgttttttagtcagaaccagaaagtgaggcagcatacagtttgtgaattattatttcaatatgttgtaattaattaattaaagagaaattgattcttgatatatttgaatgattcatttctaatcttaagcatttgtacttaacctttgtgtactttgatgtaaatgtacctatgctgcttcttattaatactgattttgaattaatattggcatagagacagttatttttgatgcttttccagctgtgtaaatatacgtattgcataaacaaactaaaattaatcacagaatttactgtgctagcagcatttacaacttcattgtggacccatgttttaaacatctgtccttcatttactatatcttaaataggcttttataacacaagcagaattacaagtatttacacaaagatgataaaatacaatagtactgagaagaagaaacaaaattttggagaagaatttcttcataattaacacagtttgggttagtaattctcgctctcatagaaacaaataggtgcctatccaaaataaggaagaaatcatttttaagagagttcctgagagactaaactttttaatactttaaaaaatgttgaaagcaaaatttttaaaggggcaatttattttttttaatgttttgtcttatgttaaaaattatataactttctcattaaataactagtttttcaaataaaaaaaaaagttatgtgccctttagttaggaggctgtacaaagtagagacacagatttagtaaatatgactttcaaaagtcccaccaacaatgactatatatctgtctaatttgattatgtaaaagttctagaattttatttttatggttaattttttagtttgagccctgcaaggctagttcctgatgtattttcttcaactgatgttattttagataaaattatttttatctgattttccattgagaaatcatggacatttgcttccttggctgacttacaggtacaggtcagtactaaaggacccacatgaataggccttacatatgagacagctcaccccatgcagagatgcctccccaggctagctatttgtactctggaaaaggcatgagaaaacaggttctaagactgcccagtttctcaggatttatacagtcattgttttctgtatatatgggagcaaacagtgtccttaaagatgatttaaaaaattagaaaacgtaaactttcggaatagcactactgatacatggaatagaagaaaacagcaacggtaaagaagtgatgaattagaaaagatataattgtttgaagtcatcaacccacattgaagtctagatgtctgtttcacttgttatgttataaagttgatattttattatactacttattatatgtttgctttatgtatatatgtatgtatcactttacctaattagattgtagtggttttgtggaaactactgtcttttactttcaggttttcctgtagcatctaacatcacatgagacactttgtcatcttaaaataaagatgtttattaccctaaaactagatccaagtggcacatttgcttagtagtggtttcttgatacagtgttttaaggatttggggctaggtctgtgtcattagggaaaatacagttttacatttagtcagggagtctgttttgtttattactgtttatctggtgcttacagtggttgtctgacaggtttaagtcctaaataattgttaaaagaatgaataaatgattctataatagttgagacagctaataagtagtaaacatatttgctgtcttgttaactaaatcaactgtaaaatcttttctaattctaaattctgccgttaatataaatatttgttgattcagcaaatattatctcagcatccaaactcagaagttagactatcttataattcatagaatccactgaagaattgtagattcaaagacattaagaataattaagttaataaaagcaatcttttctagggtttaactaccattatttagaaacaatgaaaaaagcctgacctgtttaatttgatgaatcaatttcaattttgttatgtcaaactccaactaatattaaattaattaattgtgtagaatttttctttggtttatattgtagcttatacagagtgaaaggccactaacctggctctgaaataaggcttgggcatgattgcattctctattttatgtagggtaagatgatgcagagaccctttatctgactttatcattataatatcagaattctaaaagggaacctaatcttcctttaatatcatcttttatacgtaaagtggatccttagaaattaagtgattagatttgtagatttttactatgagggttaatttactaccaaggtcctgatttcaagattcggacctttttgagatgtcgttatttcccagtgactggtggtttaaaacactctgctaagaacgaaatggttctgtacttcacagaatgtcatctagcagggctatggggtggagtgggagtgtggctgtccctccgtcccagagggttctgtgatgcatgggaagaggcagccggagcagtggcttgcaggtgtggtccatggacccttgggagggggtgtctctaagaacctttagggcctttgtgaattcaaagctattttcacaagaacactgacatgttttttgctcagtgctgacatttgcttctgtggtttagaagcagaggcaggtaaaattgctgccacctcagcacccataaacatacagggtgtgctgtatgctgtggtgatcttcactgacacacacgaaagaaagaaaagaaaaatgatcatttaactgaaaaatgttcttgacaaagtagtaaaaattttcaatcgtgtgaaatctcatgcctttttaatgttctttgtagtgaaatagaaatacccttggtcctgctgcatactgaaggacaatggttttactcaaggagttgttgcagaactagttcctttatttaacagaacttctttttttgattgttgttgccccgtctggactgcagtggtgctgtcatagctcactatagctccaactcctggtctcaagggatcttcctgcctcagtctcccaagtagctgtgactacaggtgcacaccaccacaccagactcattttttaatttttttgtagagatagggtctcactgtgttgcccaggctggtctctagctcctgacctcaggtgatcctttcacctctgacttccaaaagtgctggaattacaggcgtgaatcaccatgcctagcctggaacatcattttttttttttttgagacagagtctcactctgtcaccagactggagtgcagtggcacggtctcggctcactgcaacctctgcctcccaggttcaagtgattctcctgcctcagcctcccgaatagctgggattacaggcacatgccaccacgcccagctcatttttgtatttttagtggagacggggtttcaccatgttggccagtatggtcttgatctcttgaccttatgatccgcccgccttggcttcccaaagtgttgggattacaggcgtgagccaccgcgccggctggaacatcattttaaattgaaaatatgacagacagacaaactaacaattcagacttagatattgagtagatgtttttgtcaaaatgagtgaagtgaacatattacttcaaggcagataattgatagtgtttgtgatggtgatacaatttgaactttcaagtaaaaactgcaattttgaaaaactttgcaactgccacagtgaccttgagagcgtctaaatatttaaaatcctttttgatgacattggtccagatattacaagtgtgattttttttttgttgttacttcattaggaaatgtgttaccatttgaaagttctgcgtaactcagtgggctgatatttttcaaatgatcagtgatcaacacatgatgttacaaaattatgcatggatgagagattcattcaaagtagaagataatagaatagattgtaatgtcatcatacagatgttttattcgtatgattcaaatctatgttgcaactaaacttttgagaaactaccacttcttgaatttgggagtagtattaaggaagaatattcataatatctaaaaaggatgttaaaatattgcaggtattttgaattattttgcaattatttatagattgtagagataagagaaaagaatggcaagagaaggagaaagatggaaggctttaacaaagtatttgcgaagtgttttccacatctactcctgacttttgcggggtccagggcaagagtacaaatggagaactgcagaccatatgtcaagatatttaaaagttataaatttagctaacatgcaattaaataaaaatatatttgtcccctttccctgacaagtataccatcttacccacaatatatgtaactatataaagcaacagtttataccaagtaactgtgggtagtgcaacttcagtgtaattgtcatttttcattaaggactatgatttattatagggagacacagcagcattggtcagacaagacaacagtagggagaaaagatttatagttattttatttgctccttcagtttctttttccatagggaaaacattcactttgtttttccttctatgagtgggggtctttcctccccacgaagactcagctgtttatccactgtgtactctttccttaaccccactcttcagatttctcagaagatgcccaagtgaggaatttgcaaggtttcttttcactcttcagcaagccatgcaagcagctctctttcctgtcaatattgttcttttcagtttctcaaacgaactgaagttggaaggccaggttccagtgtataattcctgtatttgtgtgaattctgtgctgaactactgctgccttgggaaaggttatctgactttgatcccatagccactaccctgttctctccacctgtcttcttactgcatcacgagggacttttttgcatgtatgtggcctctgcatgttcatatctaaaagcaatgttagtgtgggccatatggggcctgtgttagaatcaccatgtgtgtttcttaaacattcagttcttgggcttcaccccagtgtgccacaaagttagatgttaagagtgttgtcagtcacaggtaatgtttgaggtgtttcctagacagatgaatcttggcacttagcatcagtatttcaatatttcatcagtatttcagtgttgccctaaaaactttcctttaagcctgttatctggtttaattctctcagcaactctgagattgttattcccatttttcaatgtgtatactgtactgccactgggaaatttgggtcttgaaatggccttggtatatatctttttctaatgcaaagagtctacattttattcttcaggatttgtagatagtgttgttagagaacacctgctctatagttgtggaaactctagagagataagatgcttttatgtcaacatcaaaaagaaaatactgttgtgaaatgggtaaacaaattcggaaggtttctgtgggcaaaattcctctctaaagtttgaggaaaatactgtcttttcatgcttgatcctagccaaaaggctgagaagcgataatactatctttttaataaagtcagttcacattaagtaaagcaaattttaatgtataggttaaactgaaatatttagtgatgaaatataaaataattattaaagaatgcatgctaatcattttatgtacatgcaacagtcttataaaattcacattttaatttgctgataatttgcattttacaatactgttcttaaaggaagtaattttaggtatccagaataatgttgctgtcaacagagaagttttggattgagttgggaattgtatggaaatacctatattgtttttggaaagtttgttttaagaatgaataaattgaaagctgattaataatatttccagaaaacaaataatgaagccatttactctacttgctttttagaaagttaatattgctctagcccataaagtgctatttagtagctagggggatgttagttacccttaaccacacagtactctagttgtttccctgagttaatattaactaccacagatctgtaatttataatgtgaaagcattttagtcactggattacctggatttttaagtattttgcatccctgtgaaatactgagtgtccacttgtttatggaattatatgagctttttgtgcagttatttttggaattattatttcacacaactgaaatgtcttcctaatgataaataactactatttttcaaaactgacaaacaaaccagcctaggattcaattttgggttgcataaacaaatcaacctagtgtggttaagaaatggaacctgaactggaagagttaatcttcaagttcagcttgagctgtgtttactgatccttttctgctgcttcttgctaattggcacctcggacttcatactaattaatgggatagcaaggggcaggtggcgccaatctattttgataatccttgtcagcaatgtctgtgtaatctttttgtttaattataatgaatgtgcaattggggtgcatgaactttcaacagtttttttttcactggaagttcactggtcaagggaagttttgcaactgtcgaataccgcttcatattgcatacaaagccacttgttttaccactgtagttgtagtaattcacatgaatggaagtcgctaatggaaataacctatgcttctttaaaactagacaaatataactttatccagagaactgaaaaacatttgcctccttaattgtgcccagcgtcctcatttttggagtgagggtaacaaattttgtttaaataggggcatttaattttaagagtacttaatggataaaaatattagaataatgttttctctggaaggaagaggctaggcaggaagtcaaaataaatggaactgctttacttaagaatttgcaaggtttagctgtgaaatgactagataaatgatattgttggaaagtaaagttacctactagagaatgcatattttgttcctttccattatagagaaactgttatgtttttaaatataaaggtgggtttaggtaaaatcagttcactgtattagtagttttgaagtttggggactggtcttaaaattgtgatccatgcaaggcattatttatttgtggaaagtgagagaaagggagggaggaagaagtcgaaaaacacctccttggctgttaataccttgaaacttagtggaaaggaaataacactcaatttataaggactccagtgtaaacaaacaggagctatgataggaaatagcactagggccaatttataagacttggtccatgttcatttttcagataaaacttcctgtacttactcctagctgtttaagttagaccaaaatcaaaataaatcgtcctcaagtggtgaaaggaaatattttaattggggtatatttttggaaaatcagaaatagttactgccaatattggtaccttgataaaatttaaaattattattgaagagaatagtgtaaatttatacaagcttgggtgttatgcaccttatagtttattatataataataaagtttgattatatttgtaccttgccagagaatcttgatttatcttaatttaaatttgcaattaaaatgaaaacccattgccttaaatctgcagttctcaacccagagacaattttgtctcccaggggacatttggcaatgtctggagacattttttatttttactgctaggtagggatgccaccaggatctaatgagtagaagtcaaggatgctgctaaacatcttacactacaaggacagtctcctacaaaaaagaattatcaactgggcgcagtggcttacgcctgtaatcccagcactttgggaggccgaggcgggcagatcacgaggtcaaaagatcgagactatcctggccaacatggtgaaagccggtctctactaaaaatacaaaaaattagctgggcgtggtggtacatgcctgtagtcccaagtactcaggaggctgaggcaggagaattgcttgaacccgggaggcagaggttgcagtgagccgagattgcgccactgcgctccagactggtgacagaacaagactccatctcaaaaaaaaaaaaaaaaaagagttatctagctcaaaatgttaatgttaatattgctgggattgagaaacttgccctacgtaaatggtgccgtctactggtgaaacaccaatttatttttattttgttattagttttgagacacgttattgtctgttgcctaggctagagtacagtggcacgatcgttactcactgcagcctccaactccagccttgaactgcagcctgggctcaggcaatgctcctgcctcagcctcctgagtagctaggattacaggcacataccatcataaccatctaatgtttttaattttatttttgtagagatgaggtcttgctttgttgcccaggctgatctcaaactcctggcctcaagtgatcctcctgccttgcctcccaaagtgctgagattacaggcataagccaccgtgtctggctatcttatttatgatcactggattgcaaagatgcttgagactttatgaagaaaatacgctgaaagaaatagtcatatatgggcatgcaagtatggagttgtatgggattaagtaacaaatagcgtattcctaatttttaattttttccctaggtctaaaatataatgggaaatagcagttacaaattctttgtagctttttctttcaattcctaccatatttatattcaacatggaagaaagtacagtacttacttggcctagaaagaatgcagtgcaaatgcagtgattgtcttattgcatacttttgtgtttatgaattcttgcatcatttacatggtgtggagtagctataagttagagattttaaagaaggtttttaacctagcatattattcaggctttggttcatctgatttaataaaatttaaacctggtgttaatgtattatgaaatcaatagcattataccaaattaaacactttagctgcttattatttttctttcatgatgttaatacagctaaataaatgctgattaggatattcctttctttttttggcattttgatatttcccattggtctaccaaaattcactaagtcagttcttattggcttccttatgtaatagggcagaaatgctatgcaaaatgttaagttgtgtaatattttatacatacaaaatatgcatatatttataagtcatatgtgaaatatggagcataaaaatgtttctgaacccactgctgtattcagaaatttaaaatgaacactattaatgctgcttggagattggcggaaatagttacagacatacgtttgttcttttgaactggtctattctcatgtattggcaaagcacgttctatctaaagagcttagctcaaaattaataggaacttacgtgagcagtgggaaaggtttctcttacatatgtgttacctcaaaatagcttgctaaatagatgaaaaataacttgtttaaaaaacaataccattttgtttacaatttcttttttgggagagaagaaataggacgggcgcagtggctagcagagctgcagaagactcgttagatggcgagaggctttgtccgcagaaacaagaaggctccttcagctttgtgactgtggtatattttataaggaaacctgtgtctaaaaaaagatgctgaatgaaacttctttttacaccaccatatggtttttaaaggcccactttgttttattggaaagaaaatatgaaaactccccatttagaaataagttttagcagtggctgttcgaaaatatctttttgtgcactgttgctaggtaagtgttccaaatcagatgtattttctgaccacattgaataattcaagtaactaccctaaacaatcaacatttttcaaattctgttagtgtgtgcttctttttgaatgatagtagaaatcatttataatcatttggcatggtcagctttttttctctgaattttggtagatgtttgatatttgaaacaaaatatgaaatggaaggaaattttattgatgttctaggtgtgacctttgctatttatatttatatattcttttaaaatttcatgtgctgtgcctatttctgagctttaatgttatgttctacggcaggaaaatatttttatttttattatgtttagaagtgtgtgtacccatagagttcatttctatggcatcaatgcgatttctgaaatatgagcttataaaaagactatgggaattgagtttttaaatgagacattataaaatggtattaaaatattatatgccatgtaactactactgctaatttaaaggaatgataaagatttaatataaaatatattttccttctgacagaggaaaagagaccaacccgttctgttgtaagaaagactgtgctgtggatcaccaataatgccttggtgttcaggttagatgtaaatgaaagccaccctgttagcagggccatactctaaagttataacagagggaaaacttcagatggtttctttatttccagaaatacagtacatcttttttttacagtgaaattgccactacctttattttccttaatgggagaatatttcccatttccagtgtaaagcctataaggctcaaaatgaatataacccaacgtatttccagtttaaacacatatccacccaaagcttttctccatacctttctcctctttcctcagagatcgttgccttctcccatacaacacatgcctgccaagaaaacttccagtatggcgaaatgttttaaatgtatatgttctttccaactcttacatcagacctttgaagttatttcagatctagcagcaatgatggcaaacctttaagactcatttcttttatttttatttgtttacatttatgagacagagtcttgctctgtcatccagcctagagtgcagtagctcgttcatgggtcactgcagcctgaaactcctagacccaagaaagccttctgtctcggcatcccaaataactgggaccacaagcatgtgccaccatgcctggctaatttttttttttttaaattgatagaaatgaagtcttgccatgttgcccaggctggtcttgaactcctgggctcaagcaatcctcctgatttagcctcctaaagtgctgagattacaggcatgagccaccgcatgcagcctcacttcctttaaaatgtgtttatatgcatttgtgtaacagatttttgggttccccagctttgaaatataaacccacaaataaaacaacagacctctcataccaaatgtatgttaatatatgcaagtttatacatatgactaatgtgaggacattgattttgtacagtatcttataggttacaagctttcacataatatgtcatttgttcaatgtgacaatattgggaggcataaggggatttccattttatagcaagaacggatgcttggagggattaggtgacctactcagaactgcagtagagctgagatcctgtgatccttagttcaaggcacttcccattaggccactccaaaaatatattttaaaatccagcaagatgaccctgtttattaatagcactattgaattcaaaactgctaaatgtgtaagttagcccatgaggccaaaactcttagctacttgaataagggtgattctattagctaatatattggaatctccatttgcacactgcacgttctttgtaattaaagaagtgactttaacttacctttattttagaaagttccctttctctctttgatgatgagaaattattgatcttgacaattgaagttatttcacgtatttcaggttaaaatttcagctgccagttcagggtatcagctttttaggattttccccgctttctagaattctcctatgtcctcctacctaggtcagttgttaagaaaagtgtaataagccttattatattgggagagggaagtcaggtcctggtatcttcatctgtaacccatggcatctgttgctgtgagagttacctgacaagggcttattgtcacatcataaatacaacatgaacgtggataactgggtttacttcaccagtttcctaaatatcaattatgccagtcacagtatagatgcttgcgacattgttgtgaacatgacaaagtacccatccctggagtgttgatatatagaagacagacaataaatacaaaaacaaagaccattaagccagatcaagattaatgctctgaggaaagtaaaatgaggaaaaaagttggtagttacttttacttaggattgtcatggaactgaaacccaaaaaatgaaaataaaaggctgggtacattggctcacacctgtaatcccagcactttgggaggccgaggcgggcagatcatgagatcaagagatggaggccatcctggccaatatggtgaaaccctgtctctactaaaaatacaaaagctagctgggcgtggtggtgcgtgcctgtagtctcagctactcgggaggctgaggcatgagaatcacttgaacctgggaggcggaggttacagtgagctgagattccagcctggtgacagagtgagactccatctcaaaaaaagaaaatgagaaagaggaagaagtaagtatagggaccgtggaaggaaattagttttgggtgtgtggggaagagtgatagaaagaaaaccagcattcatggattattttcgcaaaggggaaagtgataagaaaagaggtcaaagaatcagatcgaggccaaaccatgtcgttcacagtagtgagtgtggttttgttcgaaattgggagatgttaggcagtgaagtcatgtgtgttttcaactttgtggtcaggtcatctctttagttgcttagtggagaactgtgtccatggcaggacacagtggagttaatagactcacaagaggctgttacagtagtttctgcaagacagatgatggtgacttgggctggggtttttgtagtggacatgaagacaaggggttcaatttgggatatattttgaatatagtgctactagttaccacacttgtggtagtgtaaagtatgatgattgacttggcattttgcacatgaattgtttcatagtcttcttgatctggttatgttctcagaagttgccacttcagtagctttgaacactttgttagaagaaggaggtgagtgggacaaattttggagttgatctttagatttgaaagtgattttcagaaacatcacctttattagaaagatgaattttgaattttttcaatatatgttatagaactttgaccaaagtcttagttcactagaatggttttttaatatctgtttactgtaggatagtttatcaagataaagaacattgttcaaatttgtgctatgacttgatacaatcttaatagcattgctttaagacagcacatgtaattgtcaatgaaacatttgtttaatttttattagcactggcatagatttacaattgcatgtttatgtgtcacaagtacacctgagggtacgtcaggcctcctgtctaatcagtgtgtacagtatacttttgctcattttataccaccatgcttggctggctggattgctttctttcatttctttctttctttctttctttctttctttctttctttctttctttctttctttctttctttctctttttctctttctgtagatcgaagaacataaatattatgtggagacttattatctgagtcttttaatttataacattttaatcatgtatgtgacttacttgattctgaagtcttagaaatttaacctcaaattatagcattagggttaatcctaaaatcacagaaaggtatagcctttatagcacaattgtaaagctgaacctcctgcaaaataactttctgtccatattggctgtccatattaagcttggttttccaccatttgttattccgattattttatattatacattctctgtataattactagtactttttattttcctgaaaaaaagtgctttaatattcgtttaatttttagaggccattagaagttttcccttaatgtttaaattattttagataaaaatggtaattatgaggattagccctaatcttacttttctaaaatataggtaagggtgctatagttgtttgtttttaagtctgtacttttaaagaaatgaaaggaagatttttcccctcccctcccctcccctcccctgtcctgccctgccctaccctcccctcccttctccctccctgcctccctctctcccttccattcttatttattagaggtagtgtctcactcttatccaggatggagtgcagtgacatgatctagctcactgcagcctcaaaattctgggttcaagagattgtcttccctcagcctcccaagtagctgggactaaaggcatgccaccaccagtggctaattttttaaaaaaaaacttttgtagagatggagtcttgctgtgttgccctaggtggtcccaaactcctgggctcaagtgattctcctgcctcagcctcccaaggtgctgggattaaaggtgtgagccactatgctcagccaagatttttcttaactaaatttttcacgttatcaatagtacagattattgcttctttctctaaggcccacttaaaaataaatagtactgtttaagggtcagaaaaccagctagctttgtttgtaaaccataatgaaatgaaatacttgtttccaaatttaaaagaacttgtttcccaattagcttaattttttcttttgtattttatttaaaaataaagttagaggtcaaagtactgattatttcataatttgttggagtctaaaatgctaaatcagttatctgaagtcatctgattaaaagatgtagaagaaaaccaaaatttctccaatttttatcaacatatcctgtttacatgtgattctgagggggaaactcaagttgcattattattcatctttccttttgaactggatgataaatgccgagccatcatgtcaagcctattctgaagatgtccagagtaacaataaaccttttgtgatgaaaatggtgtaggatagctatttaccaacttaacaatcataaacttacttgctacctatatttcaaggtactttccacataggcagtcttcagtttgactgggaaaatatgagtcaaaataaactatcttaaatataatagaactgtttttacttttagtgttgtactttattccccagaacactcagataattaaatgagtagatgaaatgcctgcttttatatgcatatacacatgtatttttcaatatgttccatactttttattggcagtgctaataatgaccttttatctgtgtattactgtctagttgatcattctgtgtcagagatcaccttgtagaggtaagctttccactatagaagagtcaccaaagtaaaggaaagcacactcttattcaattgatttaacttaatgaatatcatctcttcagtgcagaggcaatagaaaggcagggccaaaagcacttatcccaggaggttatatataggatgattggagacattcctaaagacaatgaggcactagcattgtgtaagagggaggctatttcactctgagggctcatgctggaattaactggtgtcattttgaaggagggttttgctaattggcatctcccagttgtatataatgccaacacctttttctattaattatttcccataagtatagctcagtaaagcaaaactccctccaaatgtataaaggtttaaaagaaactgttggaatttaattagtttccaaaagccctatgtgaactgtagcagttggttggtattatttgtataatgttttgttgtttgactttggaagcattatgttcatgtattgtggtgatggcctgctgagtaattgcaaggttcattatactaccaagactgtcaaggggtatttatggatattcatgtgcagtgaacccttgaacttgaactggtcattcttgtctcccatggctggaattgtgtttactctaaatggcaggagaaactttaattatgaaactagaaaagaggcaaaattaccttactttaaaacagtaaataaactattaagaaatgtacctgtgtttggcatattactataaaattgctatctctttacttctaaggaaacacttaataactataagctttaaatttttaaaagatgccttgtttgtggtagatgtatgcctctaaaattatgtgtttccatgtaaaaagatactagaaatctaccgtttctaatgcaggaattctgtatatcaacaaaatattaaagttgattaaacagaattaaataatagttaaaaatattaatataaagtttaaaatatgatccaagcattgtacattaattagaaaatgtttaaaattgaggaagaaatttaaaagtaaaatggaagtatttatatacagatttatcaacaagtaattatttgttagaggtaaagtttatatcacgataattgaaatgatctcttatctgtgtctcgccactagcctttcaagttcttgagaacagaaacattttctttttatttatttattttttatttcttattttttattattgttactatactttaagttttagggtacatatgcacaatgtgcaggttagttacatatgtatacatgtgccatgctggtgtgctgcacccattaactcgtcatttagcattaggtatatctcctaatgctatccctaccccctccccccaccccacaacagtccccagagtgtgatgttctccttcctgtgtccatgtgttctcattgttcagttcccacctatgagtgagaacatgtggtatttggttttttgtccttgcgatagtttactgagaataatgatttccagtttcatccatgtccctacaaaggacatgaacacatcattttttatggctgcatagtattccatcgtgtatatgtgccacattttcttaatccagtctatcattgttggacatttgggttggttccaagtctttgctataatagtctttgtggaactttgaatagtgccgcaataaacatacgtgtgcatgtgtctttatagcagcttgatttataatcctttgggtatatacccagtaatgggatggctgggtcaaatggtatttctagttctagatccctgaggaatcgccacactgacttccataatggtggaactagtttacagtcccaccaacagtgtaaaagtgttcctatttctccacatcctctccagcacctgttgtgtcctgactttttaatgattgccattctaactggtgtgagatggtatctcattgtggttttgatttgcatttctcttaaggcctagtgatgatgagcattttttcatgtgtcttttggctgcataaatgtcttcttttgagaagtgtctgttcatatcctttgcccactttttgatggggttgtttgtttttttcttgtaaatttgtttgagttcattgtagattctggatattagccctttgtcagatgagtaggttgcaaaaattttctcccattttgtaggttgcctgttcactctgatggtagtttcttttgctgtgcagaagctctttagtttaatgagatcccatttgtcaattttggcttttgttgccattgcttttggtgttttagacatgaagtccttgcccatgcctatgtcctgaatggtaatgcctaggttttcttctgtggtttttatggttttaggtctaatgtttaagtctttaatacatcttgaattaatttttgtataaggtgtaaggaagggatccagtttcagctttctccatatggctagccagttttcccagcaccatttattaaatagggaatcctttccccattgcttgtttttctcaggtttgtcaaagatcagatagttgtagatatgtggtgttatttctgagggctctgttctgttcagggatgccctctctcaccactcctattcaacatagtgttggaagttctggccagggcaattaggcaggagaaggaaataaagggtattcaattaggaaaagaggaagtcaaattgttcctgtttgcagatgacatgattgtatatctagaaaaccccattgtctcagcccaaaatctccttaagctgataagaaacttcagcaaagtctccagatacaaaatcaatgtacaaaaatcacaagcattcttatacaccaataacagacaaacagagagccaaataatgagtgaactcccattcacgattgcttcaaagagaataaaatacttaagaatccaacttaaaagggacgtgaaggacctcttcaaggagaactacaaaccactgctcaacgaaataaaagaggatacaaagaaatggaagaacattccatgctcatgggtaggaagaatcagtatcgtgaaaatggccatactgcccaaggtaatttatagattcaatgccatccccatcaagctaccaatgactttcttcacagaattggaaaaaactactttaaagttcatatggaaccaaaaaagagcccgcatcgccaagtcaatcctaagccaaaagaacaaagctggaggcatcacactacctgacttcaaactatactacaaggctacagtaaccaaaacagcatggtactggtaccaaaacagagatagagaacagaaacattttcttaatctatatatcttctagttaatctacatatattctcctagttctcaatgcagagagcatatttgatgaaattatgtggaattgaattgagagctgagagagaatatggcacattagagaggaatgtgatcgggagtggaatgacatgactggaccctgaggtacatgtgaggtggaacttgagaattaggcagcacagatgcttctgttttcagaaacttggatcacatacagagaatattatggatggattgcagatatattttttttgagacagggtcttgctgagttgcccaggctggagtgcaatggttattcacagatgcaatcatagtgtactatagccttgaactcctagactcaagcaattctcccacctcagcttttcaagtagctgggactacagggacacaacaccatgcctagctatcattgcaggattttaagaagctactgtgactgcaacgtggatcatggggataggagtagaaaaacaactccttgattcaccagtatggattatggtatcctggaaatccaggttgaacaaaggggtttaaaaaaatactcttaaaaattgttttgactggacagggtggctcactcctgtaatctcagcactttaggagactgaggtgggaggattgcttgagcccaggagttcaaggctccagtgagaatggtcgtgccactgtactccagtctgggtggcagagcaggactaatgtctcaaagaaaaatggtaaaatactgtaacataacgattctcatcttaatcatttatgttacagtagtattcagtatattcacattgttgtgcagccagtctctggagctcttttcatttggagaagctaaaactcttagtctactcaggttgctatcacaagataccacagactggatagcttagacaacagacgtttatttttcacagttctggggactgggaaatgcaagatcaaggggcttgaagcttctgttcctggtcctggtgagctcctgcctcctggtttgcagctggctaccattttgctgtgtcctcacatgactgggggagagagagagagagtgagagagagcgggcatgcacaggtgtgagcaagtgtatgtgcaagcaatacctggtttctcttccacttcttataaggacactaattctgtgatagggtccttactctcatgatgacatctaaaccaaattgcttcccaaaggccccacctctaaatactgtaacacgggaagtagggaggcttcaacatatgaattttgaagggacacaaacattcagtccataacattctttatatctattaaacaactacttcctattttccctctcctagctcctggcaacaaccattctactttctgtctctatgaatttgactctatatagctcatttaagtagaagcatacaatctttaatgtttttgctactagcttatttcacttggcctaatatccttaaagtttatccatgttgtagtatgtgtcagaattttcttcctttttaaggctgaataatattctgttgtagtgtagaccacatttcatttatcttttcatccattgatggacactgatgatccattgggttggttccaccttttggctattgtgaataatgctgctgtgaacatgggcatacaaataggtctttgagacacagctttcaagtcttaatttttgagaaactgccatactatttccatagctgccacactattttacatttcctccaacagtgcacaaaggctccagtttctccacattcttaccaacacttgttattttgtgtttttgatagtacccattcatgtgaggtagtatctcattgtggttttgatttgcatttacctagttattagtgactttcgtgagcatattggcagttcttatatcttcctaagagaaatgtccactttttaactgggttgttcatatgttgttgttgagttgtagaagatttttatatattctcaatattaacccttcatcaaatgtatgacttacatattttcttccatcccttaggttgccttttcactgtgttgattgcatcctttgcatagaagtttttaattttaaagtagtccagtttatcttttttttttttcctgttgttacctgtgcttttggtgttatatccaagaaatcactgtcaagtgcaatgtcatgaagctttgcctttgtgttttcttctaagagttttatagttttagctcttatgtttaggtctttaatccactttgaggtaatttttccattatggtataagataagtctccaacttccttcttttacaggtggatatccagtttttccaataccatttgttggaaagactctcttttcccttttgaatggtcttggcatacttactctacatacaatgccagagcaaaagcgttttagtgtggaaatgagggaatggcctaagttaaggcagaatcttggagacatactaagtaagttagacatggaggcatttccaggaacagaatggtgaaacttagaggaggagcttagaccagcttcctgagctagaaagaagatacctgcaatgttttgtttattttttaaagatatcaaagatagataaagaggtaattgttaaaagcatggacaaagatgaaagacagtcactccctcccacccctggaaatgtaacatatagtgaggaagatggcgtgcataattataatacaaggaaaaataagtattatggaagttcagaagaggaagcaattatttctgctgagattaccaatggaatcttcctgaatgtatccatcagatccatcaaatttttcagctgaaagcaacagacatcaaccatgattaatttacacaggaaataaagttattaagaggatgtttgctagctcatagactctctggaaagataggagaatcagttagaagagacacaaccaagaacagtatttaaaatttcacctcagaatttatcctggcaccattgtcaccaagcttagcatatatacacacttagttttttattttcaatttttaatttttgtgggtacataataggtatatatgtttattggatacatgagatatttattattatttcagtagttttaggggaacaggtggtttttgcttgcatagaaaagttctttagtggtgatttctgagattttggtgcacctattacctgagcagtgtacactgtacccggtgtgtagtcttttatccctcaccccttcccacccatcccacagagtccccaaagtccattatatcattcttctgcctttgcatccttgtagcttagttcctgcttataagtgggaaatacaatgtttggttgtccattcctgaattatttcacttagaataaccgcctccagctccatccagattactgtgaatgccattgtttcatttttttatggcttagtagtattccatgtttatatatatatatatatgctccatgttttctttggttgatgggcatttgggctggttttatatttttgcaactgtgaattgtgctgctataaacaggtgtgtacatgtggctttttcatataataacttttttttccctctgggtagatacacaggagcggtattgctggatcaaatggtagttctacttttagttctataaggaatttccatagtgtcttctatagcggttgtactagtttacattctcaccagcagtatactagttgttcccttttcaccacatccatgccaacatctcttatttttaaattttttaatcatgatcatttttgcaggagtaaggttgtatctcattgtggttttaatttgcatttccctggtaattagtgatgttgaacatttttttcatatgtttgttggctatttgtttatcttcttttgagaattgtctattcatgccctttgcccacttttcaatgggattatttgtttttttcttgctggttcgagtttcatgtagattctggatgttagtcctttgtcagatgcatagtttatgaatattttctcccacactgtgggatatctgtttactctactgattatttcttttgctttgcagaagctttttagtttaattaggtcccatgtatttatctttgtttttgttgcatttgcttttggattcttgatcatgaactctttgcctaagccaatgtctaggagagtttttccaatgttatattctagaatttttatggtttcaggtcttagatttaagtttttgatccatctcgagttgatttttgtgtacgatgagaggtgaggatccagcttcattcttctacatgtggtttgccaattatctcagcaccatttgttgcatagggtgttctttcccccactttatgcttttatttgctttgttgaagatcagttggctttaaatatttggctttatttctgggttctctattctgttccattggtctatgtgcctgtttttatatcagtactacactgttttggtaactgtagctttgcagtatagtttgaagtcaggtaatgtgatccctccagatttgttcttttttcttagccttgctttgtctatacagactcttttgtggttccatatgaattttaggattgttttttctagttctgtgaagaacgatgatgatatttggatgggaattacattgaatttgtagattgcttttggcaatatggtcattttcacaatattgattctagccattcaccagcatggtatgtatttccatttgtctgtgtcatctatgattttttcagcagagttttgtggttttccttgtagagatcttacacctcccagtttaggtatattcctaagtattttattttattttttacagctatcataaaaggagttgagttcttgatttgattctcagcttggtcattgttggtgtatagtagtgctactaatttgtgttcattgattttggggatatatgagatattttgatatagacatacaatgtgtaataatcgtatcagggcaaatggggtatccatcacctcaagcatttatccttagttttactcttttcattattttaaaatgtataattaaattattattgactgtagtcaccgtgttgtgctattttaaattaatttctctctaactgtttttttggtactcattaaccatcttcactcttcctacccccaaaacccttcctagtctctggtaacaaacatcctataccctttttgtccacgaagttcatcgttttagtttttagctttcacaaatatgtgagaacatgcaaagtttgtctttctgtggctggcttatttcacttaacataatgatctccagttccagctacgttgttgtaaatgacaggatctcattctttttcatggctgaatagtattctactgtgtgtatgtaccatattttctttatccattcatttgttgatggacaattaggtttcttccaaatcttggctatcatggctgtaataaacatgggcgtgcagatatctcttcaatatacaatttcctttttttttttttttttttgatatttacctagtagtgagattgttggattttatggtagctctagttttagttttttgaggaatatctgaactgttttctgtagtggttgtagtaatttacattcccaccaacagtgtacgagggttcccttttctctacatccttgtcggcatttgttattgccttagacaccccagttttgctgcccacgttgtcaaccctagatctggatgctgccactaaaactggtgctgctgttgcctttcgaaaatcaatgtagctgctgctactcccaccaccaacagttagcatgaatgacctgaggttttttcttgttagtttcctgtaaagtctgggacgggtacatatgatttggagaatttcagtcctgtactcatgtcctagctacagaagctatgaaagtgagtatctgactttttcagcttccgtgttagtggagtgctacctcccagcattagaaaatgcccaacaaataggatgggggcagggcttaaagctaagtggttgcaaagaatggctatatccatggagctgggggaggtatttgaacagctgtaggagaaatagcaatatttagatttgcattgccagagagaaatataaggtggtcattcaggaaagtattttccctggtagatgaaatgatgtaaaccgaagccctgatattactagggaacatgtttgagaaaagaggttattggaaagaatcattatcacctatacttgtgtgaatggaaaaggaaaagcacatggatagatagtccctcatcatgaaaaccaaaggatgagcttctagcagatgactagtacgttgtatttgttcagtattcttttaaatgagtgaggctctcaagaagggaagtactcttaagaaaggaagcccagagttatgtaaggatgaaaaggataaagactaagaaaagtacatttgttgacctttggaagaagaaattcataaatatggtaggtagagaaaccagagggcaagccaggatttggaagaaaaaagtaattggtatgagaataattgatgacatgaggggtcatatactttagaaagagagagatagggctttacaaaggagagagtttgaaaaaagacttcttgaatacgtattacatagtcgctgtttcaagtattgggggaacgtaagtggacaaagtggaaaaagagctatgccctgagggttttgtactcaagtggggctgagggggagacagttaacaataaacatagtaagcaaattatgtagtagttagaaggtgttaagtgctatggagaaaaaaagataaagcagtgtaaggaggattgagagtttgggaatggggtggttgtagtagtaaatagagtactagggtacctttcaatgagaaggcaagaattgagccaagatttgaaggagtcaatggagggaccttttagatattgaagagaagagcattttaggcagaagaatcaggagacacaaagctctgagctggatcatgccttgtatgtttgaggaacaggatgaagaagggggagaaaaagagcccagtgaggtagcaattggaagccagatcttgtggagcattgccagctattgaaaggattttgcaaggacatcataagcatccggtctaggattggcaactctcttatattttctgtagcccagcctgagtttcgtctaaagcttctcacacaattcagaaagacatcaagctttatttccataggctatttctatttgtactcccagaaagtgatcatctaaaaaccaacacaaagagataatgttatgcaaccaatgtagagtgaggccaaatcctctattgaaaaggcagaggaaaaattatgatgaataatttatggttcttttgcctaacttcataaatatttttggttcaatttgtcaatttctgattatacacataccattttaataaaaaattaaaaatacgtttaaagaaaatgtttctaaaatagcagttactccttttgaatgtccttgcttctctttttttcttcacacatcctttgttagaggtgctaatgagatgtagtgaggactctgaagtgcttccactgtaaacttttgggagacctcagagaggaaattatggtgacaatttaaatcacattggtggtcttaatggatcttaaatcatctggctaaatacaggctttactcattttggttaaggttgaatttgaatgtttcatttggcataaaccttaggataactcactgcttgactaaatttttcacttttcagctgggtgtttggcggtacagacataaccacataagagttctgactaaccgtaataagatgtgtagaacaaggtgatcggataaaggaatgtctctgtaactaaggctcttatattgacaagaatagtaatagaattttatatttttccatttttattagtagagaattgtctttgtgtcagatgcgtcactggttttatctgatatcgtgatcactaaagttcgtcctctttacctccataacttgagtttcttacttctcttatttcgtgcacattaaatatcttatgcttttgctgtaatgctctagacaaggcagagaatgtagtatctccatcttaaagtttaggtttcactaaagctaaagtctggtgtctctgtgctgtgaaattttctgattaaatgaagtttgtacatggggttcattttacttcttctttttttttttttttttacacaatctacttgtttaagcatccaaaccaatccccagtgttctgaaagttttccatgtgtagaatctgttatgttagaaaggctttaatgagattacgaagagctgctatttctcataaaaaacaaataaaggcagtaagcaggtgtgccatgtttctaagagcaggtaagggaagatacggaaatatgtgtgtgagagagatgaaaaggtttagcacaaccttgttgtccagcccacagcctgtgcaccacatgcagcccatgcttggccatgaggctcaacacaaatttgtaaactttcttaaaacattatgagattttttttgcaattttttttagctcatcagtgtagtgtgtagtgtagtgtattttctatttggcccaagacagttcccccagtatggccctggaaaaccaaaagattggacacccctggtagcatgtcatgactctgaaccaaaaatcatggcatcattgtttcttttatttgaaaatacttttatatgcacatagatttaaaatgccaccttaaataaaaattaacttcctgaaacctttatatttcctctagcattaatttttgaaggttagtaacagctaagtctactactaaatgtgtagatccataggactgatatttcgtagcactgttgaggtttctatggaaaaactggtatgtggtatacaagaacaaaatttttctctactattagtatcttctcttctaagacacttttttcatatgtaattcttatatttagatattttccaaatagttgaaaacagattttctagtagctattttcatatggtgtatggagaaacagcttaagcaaacattctttaagggtttagataagagtgatactttaaatccttttgtgttaagtatagttggtgttgatattattacatctatttaaaatttcattttcaattgacttattttatatcagttcaagttggatttacataaattttatgcacaattgactttaggatgaaataagagttatagcaatcctttttaagaaattggttttgataggaaactgttcagctttttataaatggcaagtgggtaatagagattttgattttctgcttagggatgctttagcactaatttggtaaagaagaaaatgtccttagaatctctttcaaatagagcttctggcaagtcaggttattagctcaatggttcatggtttttatagtgtataactttaacttgtggactccaggagtcgaagtgtgaataattacaatgtcagtgtgtatctgttgttatctaaaaatcaaacacaaaccctttataagtagttccttacaagcgggacaaatgaaatcttctagaaagttctcttggtgtgaagaaaacagcttgttttgttaaaacaaactcagactcttccagtgagtgaaggactacattacgtggctctggtaactttattcatccactcgtgtgccttctaagcctgcagtgctgcctcgctgtacctcctaaagtacaggcctatgcaaggaagaaaaaaccctttcctcaattccttggcacctcactctccttagttgattagaaaggtctttgagaaagttattaagaatgtatataaaatactgctttatgttaatgacaatatatgtatttgatgtacattggcacgatcatggctccctgcagccttaacctcctgggcccaagtgatcctcccacctcagcctcctgagtaaataggaatacagtcgtgcaccaccacacctggctaatttttttttgtttttagtagcgataaggtcttcctatgttgcccaggttggtcttgaacttccgggctcaagcgatcctcctacttcggcctcccaaagtgctggaattacaggtgtgagccaccacgcgtggtctataatttttttttataataaacactttacacgctttagaggagagttccacccgccatgggttggaaactcctgacctctgaaggcactgctgttgcatgacacagtgcttattgttacctcctctgaatctacagatttggaatttagaatatctgaccctccttttttgctccagccctcagactttctggtagtcatgtttgctgagtgaatcttaccagcctcccagattcttggagtcctccatccactgaatggactttttttttttttggccccagatatttcttctagaacaaaaatatctgggtccctacctagtgaagtattggtgtctgatccaatgaattcttaaccagttctcagggcttttatcttaggcatacacagtattcttatctaaattgggaatgatatttcctcccgcacagggtggcagtgaggattaaatgaaataatcagagtgagcatccctaatccaaaatctgaaatactccaaaatccaaaacttttttttttttgagacggagtcttgctctgtcgcccaggctgtagtgcagtggtgcgatctcaattcactgcaagctccacctcccggagcttcatgccattctactgcctcagcctcctgagtagctgggaccataggcgccagccaccacgcccggctaattttttatatttttagtagagacggggtttcactctgttagccaggatggtctcgatctcctgacctcgtgatccacccgcctcggcctcccaaagtgctgggattacaggcgtgagccaccatgcccagccaatccaaaactttttgagtacccacctaatacggtaagtggaaaattctacacctgacacatttttattgtattaacggtatgtcataatttttactgttaggtacctacgtgtgaataagtgggagaaaatgattgcttattgataatgtacaaattgagagtcagagataatggtgatgccaaacaaacagattgtaagagtcgctgacacagtgacacctttgttctcttatggcttgatgtatacaaacttcatttcatgcaaaaaaaattttaaaatattgtataaaattaccttcagactatgtctataaggtgcatgtgaaacataaatgaatttcatgtttacccttgggtcccatccccaagatatcttatgtttatgtaaaaattccaaaatgcaaaaatctttgaaatccaaagcagttctggccccaagcattttaaataagggatgcttaaacctgtatgttaagtacacacgtagtgcctcacaaacagtaaaagatggccaaatagtatgtatcatgatcattatcattgttgtcatcatgatcctagctgtcatcattctatgttctatctggaaataactacactcgccttgcctgagtttcttgctttccatctcctgccaagacatcttcctctcattctggttcagtttcttgcctgagatagtcatattttccaggtgatggtttactctgtaatgattaacataaagaattacctcggccgggcgcggtggctcacgcctgtaatcccagcactttgggaggccgaggcgggtggatcatgaggtcaggagatcgagaccatcctggctaacaaggtgaaaccccgtctctactaaaaatacaaaaaattagccgggcgcggtggcgggcgcctgtagtcccagctactcgggaggctgaggcaggagaatggcgtgaacccgggaagcggagcttgcagtgagccgagattgcgccactgcagtccgcagtccggcctgggcgacagagcgagactccgtctcaaaaaaaaaaaaaaaaaaaaaaaaaaaaaagaattacctcacagtttatctatcacctagttccctgttactagggtgcaagtctgacctcatggtcttttagtagcataccgctaaaaccaaataataaactaaagatccatgcaagaatcatgcatatatagaggcaatctggagggtttgttgctgttgttttaattagcaaatttactaagttaattttctttggtagtttaatcatgtaagttaccttgaattctcttcctactcttttaatgttcattgccttgttgtctcatgaattgttttgtaaacctttgtgtctaatcttcttattttgtgcacaggccatgcatataattattatattcataacatgacattagcttttaaaaagaattttgtgatctctaggtaaatgatattgtagtagatttaaggtatcattctatcatcaaattccatgaagcatctttgtctgatggatttgattgtgctgatgctgaaatgatgccctccaagtatggagtgttgcaatattttaagagaacacagtttggggcttattttttctttttcgaaagctacctcaaattcctggaatgagctgtggggaggggcaacaataaaacacaaacattagaagcctgtatcagaagatatcatcatatctacactataatattggagctcttgctagtaatgacagtatttgtattaggtgaaaaatggtttgtgttgttgacttgtcttcagtttatttagctatgctcaattttgtaacaaatgtatgtcctctattttataaatgacttaaaatatgttttgagtatgattgttataaaagaaaatttatatttttggtttttgaaatatatacttaataaaatgtcttcaggaaagaaaataggaatctgctaaagccattgagacctggtttataacaaaagttttgaaattttaaagctggaatgaaatctggttgtctctttatatttgtatgcgaattgtttttgttgccagtggtaactatagagaattttttgaaacagcacccttttaataacaatggtctccccaaatatattgtggcatagctttaaactttattaagtctgtcttggactcccccttcctctccctgagtaaatggaagaaaagtttggcaggctccatgctgtgcacttgattgatgcccagaacatctgaaggacttttgtgtcctgcctgctctccatgagtgcataatgtgtgaatacttaaagaaggtcagcccttatcacatgtaatctaggcctgaaagcagatcaacagtgacagtcatatcccgtaagtaagaacacaaatcctcctctacatgctttagacaagttgtgggatattttttctctctttttaccccttcccactcatggaggaccttggcagagcaatgaaagcagagagaagacgtgctcagaataatgtgtcgctcgttcaagggagaaagggattgtttatttgtaataatgtgatggtctttcactctgcagctgaagggagctttgggttgttaatgactagtgatgtggaatgctgcaaattagaacggggtggggaggcaggaggcagcctgaaagagggctgaagttgtggtctttataaactccaaagtcaggaaaaaagtttttgtactgtgggctctattgttagtttttttttctcatagtggagtagttttttatgatagtatgtaagtgtttagttaaaagccagaataataaaaccaaataccagtgcagttctgagggcacttttgtttttggtacaacatgtatgaaagtttgaaaaacattttagtgcaaagctcttggtaggacctaaaaggctgtggcttccaattggaagaaggcaataactgttgttattaatgtgcctgtgtgttggaacagaagtttaattaaaaagtaaattttattccaaacagtattagcagggatgtttacatggtaaagaaaataacactcaccttattgttctcattaagaataacaaatatattattatgttttcttagatacaaaggaaaatatttttcatcttatctccaaaactttattagtttcccttgaaatataatgagctgcaagaagtagtagctgtcagtttgcacaatggaaagtaacctgtgcttacctccagaaatgaagacattgcttcccatgtgtgtaggataaaatcaaaacttctaattatgggctacaaggctcttcctaacctccccagtctacttttccagcctaattcccctgctctctaggcatatcgagcttctcgtgttctctgcaagcactactttttttcttactcataaatgtactgtactgcctgttctctttgcttaggattcctttgccttcccttcacccagtgaattcctacttatctttgaagacccagttcaaatgcctcccccacgcaagtccaaccctcaccctcaggcagaattaatctttgtttattcactgttttttccatgtttcctcagcatagcaggcagttactgtactgcattgtcattactggattgtatgtttgtcttcacccactagaggataagctttgtcctgaaggcaagtgctgtctctttttaatgttctcacatccattcagtagacacgatccccccaaatatagcaaatagtgaatgttttttagataaaaactgtatataaacataagatcaggagatttggggagtttctgtgtgaaaatgaatcacaaattgaaattggtagcaaggtagtctcaatttaaaattcttcagtatacttctacttcaaatgcatgaatatttaatgaattaaatgaaaatgaattgatttgaataaatatttagtttttcaggtataatttgactttttttttgaggtgaggtcttgctgtattgcccaggctagtctcgaacccctgggctcaatcaagcagccctcttgcctcaccctccctaataactgggactatagccaagtacaaaccactgtgtccggctttaattgaatttttaaaatcttgacttaagagatactttgtatccttgttttaatgatcacactgtttgtgacaggaacaacttgataaatgttacattgtagcctgttatattaaagaacattatttttattggcaaagcttttcatgtgagaggcaggagagagattagtgagagttgtcaggaaattactgacattttctgatattttcctatattctgggcactgtattcagtagtctatattccttcatttatttagtgcatataacaatttaacagttaggtaatgagcaaacagagagtttaaataatctgccccagattatacacatagcacaaataggccctttctactgtacagcaaagactccgtaaatctagaatgtgtgaatgtcattagtaagaactctgcaaatgacatacagtgatgacatatcctacacatattagtagtactctccatagtgctcctttttccttcctctgcccttctgtcaggtgtacattttcaaatggagacctttcttttaatcttctctcagaactttctttgaagactcctttggtatataaattaacttgcaaaattaagttggctatctcagtagaagaagaacgcctcagacataaaccattgttattctcctttctgatatttcttcttgtaggtaaagatgtaattgaaatagaatctattggagcagttaagtgaacctgtgatgaaagctgcacaagcaggtgtataaccatttggcacattggttccttctctgcagtcaactctgtagttaggagatttgggagtgaatgtttaactgctatgaaactcattttttaaaataaactttttattttataattgatttagaaaatttccaaaggtaatatagagtcctcatatacccttcacccagtttcccctgctattaacatttgaccttactttggggctgtatatgtgtcacagctaagaaaggaacaatggtatattaccagcaaccaagctccaaactttattcagatttgtttcctctctccctttccataatgccatttttttctgttcaaggattccatctagaaaaccactttgcacttagtcatcatgtcatcttagtctctgttggtttttaactctttttttacactttccttgatagttttaagcagtgatgatcagatattttattgaatatttctgaaatggagttggcctgatgtatttctcatagactggggtgttgaggaggtagaccacagaggtgaagtgccattctcatcatatcaggggtacctgctatcagcatggcttgtcttcagtcatgttaacctcaatcacctgcccaagggagtgtttgccagttattccagtgtaaagttatattccttttcatactgtactccttggaagcaagtcactaagcacagcttagagtcaagggtggggttgattaagctctgcttcatggagcgagactatctaaatatataaattttttgaattcttctgaaagggagatttttcccattctaccattgatttacttggttatccagttactaaatctttattttaaaaataatttcaacttttattttagattcagagggcacacatgcaggtttgttacatgggcatattgtgtgttgctgaggtttggggtacaattgatccagtcaccctggtagtgagcatagtacccagtagtttttcaacccttgggagcctgcgtgtctccttccccactccagtaggccccagtgtctgttgttgccatctttatgtccatgtgtacctaatgttaagttcccacttttaagtgagaacatgcaataatagggatacatctgttcctgtgttaatctgcttaggataatgccctccagctgcatcaatgttgctatggtttcattcttttttattacactgtagtattccatggtgtatatgtaccatattttctttatccagtctactgctgatgtgtacctcagttgatttcatatcttttctactgtcaatagtgctgcgatgaacatataagtgcccatgtctttttggtagaatgatttattttcttttggatatatacccagtaatggctttactgggtagaatggtagttggtagtactgttttaacttgtttgagaaatctccaaactgctttccacagtggctgaactaatttatattcccacaagcaatgtataagcattcccttttctccacagccttgccagcatttgtggatttttgactttttagtaatagcctttctgactggtgtaagatggtatttcactatggttttgatttgcatttctctgatagtgatgttgaacattcttttcatgtgtttcttggccttttgtatgtcttcttttgagaagcgtctgttcctgttgtttgcccactttttaatgcgattatttgtgttttgcttgtggaattgtgaaaccagttcttgacctggtacagatagaggcttaattagattggatattggaaattaaaatgtaaactgtagataaaaatatgtacattagggtgagagggttaaatcataggcaaatctgggtggttctgctaaattagacttttgatctacatagtaagtttcatgagattttttgaaccaagtagtcaggggcctaatatgccatttatagaagatccccttcattgttggcacctagcatatgttaataattaaatttaaaatggaggaaattaacagggatacgtcttgattttttaaaatattgctaaatgaaagaaataggcattagcaagaagtttgactaagtggaaacctctcctcacatgtttaatctcgttttcactctccctcacctagttggaaggtgaggttcagagattcatcctacatgctgaagtccagaagtctttttggagatggggtcttgctctgtcacccaggcatgattgcagtggtgtgatcatagctcactgcaggctggaactcctggcctaaaaaaatcctcctatcttagcttccccaataattgggagtacaggtgtgaaccaccatacccagctaattaaaaaaaattattttagagacagggtcttgctatgttgctcaggctggattgaactcctggccttaggtgatcctcctgcctcagcctgccaagtagctgggattacaggtacgagccaatgtgcccagcataaaagtttttttttttttttttttttttttttttttttttttttttttttttttttgcagttcatatattccaaactctgtaacctatattcagagtcctgcacaatttggttccactctgtctagctttctttccaaccacttactaataggagctgtctgttccagtaagattgtactcatgctgttgcacaaattgaaaattcatttctacctgtaagccttgctcatataatttctttcctctcaacttctgtattgctgtataagttcaattcgtctttcagcatccagctctccctgcaatctgggcccagtctgttccatcgtctgcttggaatttccatgtttattctgttggggccacttcatcttaaaatgtcttacattttttcttaattatttcttatatacttattctgtggtgttataaccttcttgaggaaccaaatcagcttgcacatagttcaaaatcagaaatggttgctgatatgagttcttttgaactgaattaggattctggggagagagcagagattctgtctttaactttcagccatttatagaagcccatattggggaaatgtgagcagtgggagctgtcccacatttcagctattcacttcttgccccagagctcaaggctggattccaaattggcagtggaaccatgttgtgaatgtggctctgagcccaacatagaaggtttaaaaagcagattctattgcttgatttttgtctgtttttcccacataaccctctgctcctgatcatccttactcattttactatataccaatctcttttcctaactaaaagggatatggataaatattactcaaagacagttctttttaattaccaccaacctccatgtttctgacgagtaagatgcatggcttctgtgaaatgcagaatgtgtagtttagtaaacttagagtagtttaaggtttcctacatggttaaaattctgtattttgcttaaatttcatgaaagtacttaggaaagtataaattgagggtgttgattgattgtagtatgtgtaaaattatcaaaacaaaaaaaacattgttgggtttcctaagctagagggtagatttgaatggtacctagaggaatagtgctgggaggtgcaggatggggtcaggagtaggggcaaatgagggatgtcttttgaaagtgagaagaaagcagagattctttttccaagaaaagattttttaaaatatcaagtaaacatatgatgatgatatcttagatataaacattgtaatacatttgctactctactcataaatcctttatcagacaaactgatgggatttaataatgacgtctttttgtatttgtctatggtagcattgtagtttctacatatactgacaattcatttatctttcttggtgttcttttattattaacagttcttagagtaaaacaaaaacaattttgaaaaaatttctttatctcattcaatatcatggcaaatgaaacgtcacaaaaatggtcataatttacattgagaaacaattacagttaaaatctaaaaagtggaaaaacttgcaatggttttatttatataatagtcagttaggttaacagctcttaaaactatagtcataactgaagtatcttaacttgcagtattcattagagatttcttttatatgtgacccttttcatatctgtgcacttgattcaagggtattcacttcattatttatctggtgacgtagtgtgagtaaactactgtaacacaatactttgatctgttgcactatttttggcatttcactaagtaaaaacattatttcttgttttctttttacatttctcagttaaaattcttagcagagataaaaatgttggtaaaagaaacaaactattttatgacagcagcgttttaaatgaggtttgctatggattcccttcatagctgcccgagagatttgggggacatgggtattgccagcgcagagtgaagccccggcgtgtgctagcccttgtgtgggcagctgggtcaggctcctttcttaagaaaacaatccggctcagggtcctcaccgccctttgttgtcctccccacgaggtgatcagttgaagtctctgtggtgacagaaccagtttgtaacaggcttgtctttcacggtcctgtctcagggttgctggcaggcttgcgagaagatctgacaagagtggcagcagaggcgtctcagtgaaagacggaaaggcaagaaacaggaggcttaaacaggcagggcacattgactgctctgctgctgcaatgggttggctggaagaactaaactggcagcttcacattttcttgctcattcttctctctatgcacacaaggggtaagaagatcagtgccctccactacagtgctgatggggctgagttagagtctgatttcgtggcttttatcgcagaagggaaagttcaggccagaagttcaatgtctataaagttccatcccccattctccaactgccctgtaattttactactttctctattatggcaaggctttctaagtactctgttagaataattttaaagagacttaacatttctattttctctaacaattgagaattaaatacaattaaacttggaactttaggaaattcattctcaatatactgtgacagtttatatgtgaagaatttaagaaaacagctattctaacaaacttttttctgattattttagcttgaatactgttagatttttataggttagctagttttctttgaagttcatcatcatttttatatggatgcattgagtaaatctgtaattttgcaatggaaataattatagtttgtgactatgtcaaatgtttattcacctttaagaacaggggcttgctttgtgataattttgttcagaagaattattattttatgaagttgactaaaatatagaaaatgttaaagcttatttaaaatttttgaattaaacagtaattttaagagtggttgagctattttcaaatgagaaaaaagctaatgaactgaatataactggccgtggcagtgattgcaaagagggagttatagagttggaaataaggaaataatggctttataaaattaagccaaatgataaagggaatatgtatgagattgaaatgtatttaaagttcagctttatgtacttgtggatgcatattatagaactaacttggctgtactgtttatcagaagagtgtgtaattttgattgggatttacagcattcagattttcataatctcaaagtattctgtgacactattaagatactatgttctgtggcttggccctacggaaaaagtttttaatttctgtatatataaatgtatttttacttataccgtatacataagtttaatttttgtgtgttgatatgaaggaatgataggtatttcatcaacctagtttgctagtttagtctctaaaaattgttgtagggagaatagaaaaacttcagggaaactgtgtcttaagaatgttccaggaagctcgaagcatgatatatgtgaggtaaaattctcattcctctattctagctactactgcctcttcattgcctgagagtcattttttattctcttttagcattttctttgaaatacacgaatacttggctttagtattgagttatgccaataaaaagcaaagaggccatatgctacagacagaatctttgaatcataaaatgctaaccttagaatgtcccttaacataatgtggtataaaataatgtcttaatgtcttatttcttccagtgaggaagttgacatccagagacattctttgtcttcctctaggtcatataggtgtagggaacctttttaaaaagctccctttgcagggcacttgtgtgtgtgtgtgtgtgtgtgtgtgtgtgtgtgtgtgtgtgatgtgcctgtacttaatttatcttatatcatactatcatagtggctaagagtacaaattctggacccagaatgcctggtttttaatcttagctctgccactcactagttgtatgaactcaaatgaattatcttattgttgtctcaattttcacaactgtaaaatagggataataattatatttactatcaatttgactattaaatgagtaagtatacataagcacttagaatagtgtctggcacataatattacctgaaagtttgctgttgttagtatcattattaataattaatttatgcaaaaataggaggcaaccaagctagaaatgtacattgagataggactgtgaacatccaacaggtcatcttagtgtgatgaacatgttgaatcccaattgattttcccagctttgtcaccaattgactttttttgttgaggaattactctccgtaactttctataaagtacacttgaggttgtttattttattttatttttgccctgataaatacagaatgtgctataaacagagaaggactatgagattaacagaaattaagccacttagactattaagttaaatattccttgacaacatctaacatcctttacaattattaattctgcgtctacttcagtgagaataatgatcacagaaaaggaaaatacgaaacactgataaatgatgtgttcatgactttcaaatgagtgacaaagccgagattaatattctgagatcttacatccatatttaaaataaatgtctttcaaaatgacgacttgagacatttggagaatgtgagcatcaggtgcataaaaatattttgttaaatatatggaaacctaaaagatttatatgaaggaatatgtgtaatattgcacttccacctcaagtggcacaaagctctgcaaagtcacaataagtggaaagaagaactcttcctacttgggatagaagcaagggtggcctatgtatatggtgactcatcaacctaaatcttaccactgcctagctattaccttaaatgttttactagaaagagatacaggctttgaaaaaggaggcatgagtacatcttggtagaggtcttgaacttcaagttttttaaatactggaatattgtgattgcttcagaaacatatttttaaatctagggaaatggggaattgccttcctaatagtgaaaatgtgacctgtaatggtcaaaatctgtagtgttaatttctacttgaaatggattatgtttagattgagctacttgtactatcctacccctttattctccaaacatagtagagactcacaggcagtcataatgaatatagtgcaatgtgtaaacagtactaaaatattgaatatagtgcaatgcataaacagtattaaaacatcattttgttcactaccattcttcttaaattctgttaagagaatttagtaaagttataaagatggtagactgacagacctaaaaactaaaggactctgggtttgttgttctaacacaatggtggcaacaatgtacccgtcctgacgaggataggcctcatgttcccacatttaagatggtgaaattttcattggttccctgttaaatgtacatgtgaaaatgtctataatttttcccctataaaataatgctaataggctattaaagcaatcagattaaataaaacttggcagccacatttattttaggagcaattctacatcaataaagatacttacaggaaaacaaggtgagataggaagtagaaatccactcccttgtgaatacaggaaaatcctcaaacccagtgatcaaaaccagacccaagtctccatggtctgtacagttttatataacctggattttatgtaccacctctccgttgccaggccatattccataggtttcctattgtcatatttatgtctggcctagttgacactaatttaaaattcaaaaaataggttatacatttttttttagtataatcagggcaaatagggaatccagtaagaggaggataacaaacatggctgtgaataggtagtttcacaattagaatgataatattgctatgcggcatcagtttttggtaatattttaagtgaaaaatgatccttattaccatatggcaaaatatactgaaaatctgaactgttagaccaacacagctgttaaatgcataaatgtggttatgtgtttaaaatgttttctactacagctattttgtggcatttcttaatctcaggctattaatcggcagtaactgcaagttgtggtgagcatcacagatgtaagaaatttgatctctggtaatttacctgggaagaaaatggctaaactatagttttcaacttaagttctgctcattagattggatagtaatttcacgtaattgccaagtacagactgaaattatttggtttcacctttttttattattttcaaaatgctagcaaccgtatgcaagtcttatctgtgtataaatgtctgtacatagtataattcaaacttgtaaattacaaatatatgaaggcttttgaaaaaacattggaacagcaaaataactcaaattagtttcttttttctctgtaagccaactgaatctgaaataacattggacagatattttattgatttagaacattgtacaaatcttttattgatttagaattgccaggaataaatctatgaattcttcccccaacttttcaaatgcatatctatttttagaattcatataagaatttgaacaaatcctcaaataagagaaaatattgacaactaattatagaacaattatcttaatcagctaagttttctgtgaagctttcttatgctgcattttaggtccagatggcctcttttggtcttgattattatacttgttatctgtaaaatagagactttgtctatattaatatatatttgttggtttggaaaagtgaatagtaaaatacataaggatgatcttgtgactttgcactctatttttactctagacctctccatgtttcttttaacttggaaaatatctttccggattaactgattactctgcttgatactatctctgttacattcttttgatgattagttaactatataaaatcatagtattgatattttggttataaagaacagaatcttaagtagagaaagaagtttaatggagacataaagaaaaactaaaggaaacacaggcctcatgggacccagcaggccaggaggaccggaacatctccttgtctatgtctgtctctctctgagggccttgtgcacgttccactctcgctgtgtgcgtctgctcccttcttttctttttgtttaaaattctttaatggacgctccttgtatttaggataaaatccagatctttctgtgtcctgcaaaggtctgatatcagctggctcctgactcatcttgcagctcatctcactgcttactgagcatcagccatataggcctgaaaacaaacaaaacaaaacaaaacaagacaaaaatgatccaacctttttctcactcaggtacttcacatatactgttttcacagtctggaaagttctttgcctttctactctgtttatccatgcatttgcataagtgccatttagttaagttttccttaacaatctaaattaaatgaaacccctttgatataatccctcattgtgttttatttttcctttatggtacatatcataatttatcattatacatgtcactctcctgctggaagctaagcttctcagaagaacaaactctgtccattttatttattgttgtgtcttgagtgtatagcacaggcttggtgtatagaggaatctatgtccctggacatacttatagtttcttgcttgactcaaaatggtggctgcagtccctaatgttccaagaccattttgcttagctctgcagagttaactgacagatgtttcactttttttttttgagacagaatctcactctgtcaccaggctggagtgcagtggtgtgatcttggctcactgcaacctccgcctcccgagttcaagtgattctcctgcctcagcctcccgagtcgctgggactacaggcacacgccaccacgcccagctatttttgttgtatttttagtagagacggggtttcaccatgttggccaggttggtctcaatctcttgatcttgtgatccacccgccttggcctcccaaagtgctgcacttttatttttaatttctttggagggagaatttgattggctgcggacccttagaataatcaaaggtaacctactagccatgttaaaggtttttgattgccagtgtaatccaaacccttttctagaaaaactgcacctgctcacagtgtctattattgtctggtttttctagaagagggtttggattatattgacaatcaaaaacctttaacatggctactcttgtcacttatgatagcaatataaatacttccaggactcttttgtttgtagtgaattgatattggctagcaaatgagttatttatcaactaaatgttttgaaaattattttaaaaaacactttaatatttctcacttgaacttcagaattcagcaaatgttactaccgaaaataatgatgatgtatttctataggtcctacagaattatctgaagagtaaatgaaggtagatctgactatcttttactctgtaaaaaaagatgctatagaaattcgggatgtcaacgtggtggcagaaataatgtgtgaaacaagtagtgtagtgacttgacagactttagttctaggacattgttatatgtaagtttcgctcctttattgaaatggtagttgcaaactatatgtctcataaagaacatctcataaattttgcatttatgatttctgaacaggacatgagtttgaggctagtgttatacatcgttcattcaatcagattctgggaacttaatgtctgaaactatgtttctgatttcttctggagtccagaggaaaattaatgtacatttcaaatttacttttgaaaacctcatgagtacctggtgaaaattgtctttggttcgtagttttttactgccgtacagtgttcagtgttgcataatgtccccatagtcatattggtgtcttcacagttttaatgggagttttacatataaggaaatagtgacttacactacttaaaaaaatcaattgtgtcacttccatgatgtagaaactgcactgatgagataacagccaggtgtgagtcaatttaatgtaacaggacatcttaaaattttttctggccatctctgtctaccttcaatacaagctatgccaaggccaatagcacggagcttcagaaaatccaagccaaggtttgttttggaaacgccacatgaaattatctttctgttattacatttatagaaatattcattatcaaactaagtctttgctaaagtgtttacctttattttctctctaaaagaaaactacattttttcaaatctgaaaaattcaaatcagtatttcaaatcactatttttttcagatctgaagaaattaataaaaacttgttgcttgcagttgtgtataattttaatgattatgcacttttttatggcgctgaatctcaactgaatatttgtcttggttagagttgatatgctcaaatatgtgttgttttcaaattgcattataaaacaagtctttttctgttcctactttataaaaaagttaatgttgtaagaatgacatgctgtatttatccatgaaataatggctgatttgagtgaggaaatgtgcaccagctctttgggggaatagttgagtggcttttctgaatttaacttagcctctgaattcagctgaagttattgagaactgtgcagtgacccggaaaacaacaacaataatcacaaaagagttccattgtgacatgttaatagaagaagggtagatgccacttaagttgcctttttcttcacacacttgcttagacacattatacttatccacacacatatgtttcttatatatatatgtgtgtgtgtgttttcataggattattacaatttattgaaatcagacagtatcactaaatatttcctacttaatttcctgtgccccgagtgaaaagatgttcaaattgggggaagagtctaaaggagaaagagccttgtgctaaatcatgtgattttataggcacatgacattctttcaatgggggaatttctgggggatcgtttttgggctgattttatgcatatataccaaacagtttattcataacataggaatattagtagctattatgaatattattaatctactctacttaacctattatggtaaaaaaaacaattttctatctttttttgttaaataaacttaatgacaaacatcttgcaaattagattttcatatatttcatctctttcttatgctcaatttaatctatcaaagccacacattgtagaagacatctggtattgagcttaagcagctgggtttcatttgtaagggttttgagcaaattttggtgcttgccaacaataatataacagttggccaatgtgttttccttgtggcagatttgtgcagtgtggcaaaatagacctgagttcaggatcaggtgcttttctgcctctttttggcctgtctggtgggacttcagaggttttatgcagatgttcattgagcactggctgagcacttgctgcaatggccattgagtacaaattagctggtgagcagtattcgaccaacacccctcaatttcagaaacacggagtctgcagttttcccagtatggttctatgtatttcctgtatcagaatcactgcaggtcgtttttaacatacaggtcccaataccccattttgaaaccactaaaccaaatatttgggagttgagctgagaaggcttaaatttaataagctatcccaagagagtttgtacacattgaattcaagataataaagttcagtttattctttccctacagatagaacctctaaccccactttcagaacaagagaagaaactgtgtgtatttaaaagggattttcagactttgtttcaaaagtaacttacccatatacccagtttagacattcttttataaaatattttatcagcatgatgtgttgtttaataaaacagttgtcctagcactacacaaatattgtccccaatgatgaagaagggataaggaatcttaatttagtatgaacaatccaagtatgagctgaaagatttctgcaagagtgaaatgaagtaggagtcccaaatttcccgtctcttcctcagatacatttaactaagtgatttctgtctccaaatagtcatgagatacctatgaagcgcctggaaatctgttcagagtttggctctgtgattgctccttcagaaagcactgtgttgcagtttgcttgctcctgggccctctgctcatccccagttatattaaacagattattcctaatggaaagagttatgtctttgtggctatctaggcagttttggggactgttctgaaaagaaactaagtcataactctttcctgcttctgctggaaaagatctatgccagaattcttactaccttagtttaatattattttgtggattcttgagtccagaattgagttttccagataaacacttttgagttcccgggcaatatggaaacatacccagggaatgactgtgtggttgatgtgaggtttgcctcttcggaagtaaataggtagtctgattgttgttatcattaactggaaatgtactttttaccctatcttgctttgaaaattagcactcaagatagctatttcagagagctcctgtgttcactcaggaatttttgacttgatttagaataaacacacacacacacacacacacacacacacacacacacacacacacacaccacacacccctccattgaatatacataggcaataccccagaatatataaaattaaaagagagtaagagaagaggcattccaaatgcttgggattgccccattccataatccatgtcatgcatgggctacatctgcagcttttttaagtttctggaggaagctcagcaatgcagctgtctctaatgtactgtgaaccttgaaaaggaatttcctttcaagtaagaacggaagtagtttgtgtgtgggatgatggagctggaggtttcctttaacagaaaataaagtgctgttatgtaaacaaacatgtgtacaacctaaaacaaaaaagcacctacatttgaaaaaaagacctggttaatttttattatctacttttgttttctcatttttgaaagcgaagaaaatgaagcagaaagttgttaggtgaattgtttaaagtctcactattagtactagagtcccaggacagaacttgggatcctagaatttttagttctagttctttaggaattactttagatttggccttaggattgttgtttaggctgtatgtttagaaagccaaaacaaggtctttgccacatgatatgtttggatttgtgtccccacctaaatctcatgatgaattgtaattcccaatgttgggggagggacctggtgggaggtgattggatcttggcggtggttttcccccttgctgttcttgtgacagtgagtgagttctcatgagatctgatggtttaaaagtgtgtggcacttccccattcactcactgtctctcctgccgtcacgtgaagatgtgcttgcttcccctttgcccttccaccgtaattgtgagtttcctgaggcctcaccagccatgcctcctgtacagcctgtggaactgtgagtcaattcaacctcttttcttcataaatcatgcattctcaggtagtttttttttatagcagtgtaagaacagactaatataccacaggagcattttatttaagaaacaggttacaaaacattccctaccatcaccaccacctccaagaataaatgtcagtgtatgaaaaaagctcagaactgataacttctgctttgatttcctatttattctaatatatgcattctaatattctaatataatttgcaaaaagtactctatattcaaccacatttagactttcataatttagtgattctgggaatgcagcttatgcatagtttgttctgacctaaaatatctcattatctgaggtgagaaggggacaaagtagaggaacacatttgagttctaggacaaaaaatttgcaccccagattgaagaatggagcatcttttttttcctcttcctaaaatgttaatctaaagagattacatgcaaaataccctaactagctatgactgcaaataagaaacgtgatctgcagctgtacaccttggaaatgagtgtgaacatctctacagatttatttcttaatgctaaaattgcatggttaatgttcctttccattgtaggatatcacttgtacttggatcctctagatttacacatttgattttatggctttgggcaattgctgtagaatgttttagaataatcagtgaaccttctttagcaggtaaaattggtgtagtatttatcctgatttttcaaactctccattaattatttcttcagtaactgtaaatactgactttggttttgcaagccgaatgagaatgcttcgtttcctcctgtggctttgttttgctgcttatatttgctacttaagggcttttaaaaatctgctaaagatgtcatattatctattgacattttataagatactctggcaaaattactcccccaagaagttctagaatggtttactttttagtctggattgtttttattatttctctgcttttaatgaatcaccttattatcctcaaaataataaaaaaagatctaggggtaaaaaagaaagtggcattcttatagttacaatagctattaataaactaatagacaataactaacatattccatttgtggttttacaatttagaaatccaagcatacaaatatcagcattcattttaggttttaatatgtgcatgtttccatttatagatgttaagcacaggacaagttaaggatagttgctctttcagatataaaaatacttatggttttacagtttttttagctatagtgattaaaataatatgattatagcctagggtagatcataggtgcaggagcttttattattccatttgtataaatgtagaaacagttcggagaagataaataacttgctcgaggtcacagagttaatacatggtacattttagattgaaatcaacactggcgtttgtatcttttcttctagcagctataccaaataacatttcttagaggagaatatttatatgacttgatattcaaaaatatgcaaaaccacataacataaaacattttagaatttgttaacagtaaaatcagtagtagtaaataaaacaaactacagacaggcaaaaggacaccccatactcttgaaaaacatgctgtatgacatataactggaaagtatctattattaattgcatataaaaaatcttcaagaaggagaaaaatgaaaataaacaataaaagtagcagaagacacgaacagggcattcatagaggagtaatatggaaatataggaaaagaagctaaataaatagagaattgcaagttaaaataatatgacatatcacattatagtcagcagattggcaaaataattagcagttttagattaccaaggtttggcaaggatgtggagaaatgggaacccttaaccactgttagttggagtataatagtttcaaccatttttaagagtgatatatatcatttataggtatagataaataattatatggaaatattcataagattaagaaactgtcatagatatgacaccaaaagcaaaagcaataatagaaaaaaataatgaaacagtctttgtcaattaaaaaaattatgtgctttagaacaggggttcccaacccctggaccatggactggtagtcatccctgacctgttaggaactggccacacagcaggaagtgagcagttggcaagtgagcattatcgcctgagttgtgcctcctgtcagatcagtgggagcgttagatgctcataggagagcaaacgctgttgtgaactgtgcatgcaagggttcatgcacagttgtgggctccttatgagaatctaatgcctgatgatctgaggtggaacaaaccatcccccaccacccctcccacccctgtgcatacaaaaattgtcttccacaaaactggtctttggtgccgcaaagactgaggactgctgttttagagcacgtcgccaagaaagtgaaaagacagtccacataatggaagaatatatttgcaaatcatgtatcttataacacccatgaatctagcctatgtaaagaaccgttacaaattaataataaaaagaaaaataacccagtttgaaaatggacgaggatctcagcagacatttctccaaagaatgtatacaagtggctgacaatcacatgaaaaaatgctcagcatcctgttatcagagaaattcaatcaaaaacacaatataccacttcacatgtactaggatggctgtaataaaagatataataaaaaatgatcctaaagatgtggagaaattggaatcctcatctgtggctcctgggaatataaaatggtaccaccactttggtaaacagtctggcagtttctcaaagtgataatcatgtagttgtcatatgatccagcaatttgactcctaggtatataccgaagagagatgagaaaatgtgtccacaaaaaacttgcacccagatgttcatagcagcgttataggtaatataaatgttaaatatattactaatacaaactgttgtatatctatataatagaatgttatttggcaataaaaagaatgaagtactgatacatgctacaacatggataaatcttgaaaactatgctaagtgaaagaaaccagatacaaagaccataggttgtgttttctatttacatgaaaattccagagaggcgtgggggcatagagagtgactgcctgtatatggttttgtttttgagggggttgaaaatgttctaaaattatgtcatttgatggttgcataactctatgcctatattaaaaagcaatgatttgtacatgttaaatgagtgaattttatagtatgttaattatatcccaataaagctcctaaaaatattcataggcgtgataatcaaatttaggatagtgcagaataagggaggtgaaggaactggtactcatttgacttcattctctaatattttattccttagaagtaaaatatctgttaagattttataaaaatgaattgtaagaatcttgtattctcttatccatttttaaatatatttgtagcattttatataacagaagagtcagccagaaatgaaattaagtacattatccctcctccctttcagcttgaaacatggattttttcctaataattgaagacggttcaagaaaatatcttctacaagaaaatatgcaactaggagtcctgcaatgaacgttgtttgctttcttcaatatcaattataataatattttatctttaaaatcagaattttaccgaaacagttttgtcattttattatttaactgatgagaaaaactatatgtgatttagagttgccatgagtcctgattcaaatcagattacttttcttttgctaaaaacttagcgcagtagcccacctgcaatcctgcttgcttaaggggaaatggtaccttcttgggacagctgctgttcataattctcagtctagccttgtgagtagctgttaatttgcctatgaacctttatcatggtctctcccctcacagaataaaagattctcttggcagacaaagcacaggccctaggccagaaaggctcattcctgaatcagaggtgtctattacttttctacttgttaatataacagaaatgcctttcctgtcacaggggagagtggttgggaaattgcctgtactgacaagcccttctcagataggaggagcacatagacataacataagcatattttcctagaatattgtttcatgcttttcccactcagggccatggccattactggggagggaaaacgacctcagggccttgaggtttgtttgttgtggtattaataacatatgatggcaaagatgaatatagttatgctagcattcaaatacagttggaaatgcagttattctgtagcatacaggttaggtaaagtttctttcttctgtttctagagcttgtaaacataggagcgattggaatagtttaagcaaagtcaaagtgagaaaatatgcagtgccagaagcttgtgtgagggagtggaaatttttgcacaaaagccagaatttgactagataatacttttcaaattgtggtccctgcagtggcattacatgggaacctggtataaaagcaaattattgggtctcaactaaaatccactgaatcaaaaaccttagggggtttttgagcccagagatccatgttttaacaagcccctcagtgattttgttatgcattaaactttgagaaccactggactaaattatgttggtttttcaatggcaggtgaataacaggcaatggaaatgcatggaaatgcatttgtgagcacagttttggaacgattaaagcattttatttaggtaatagagtcttctgtcttatttttctagtagaggaattttagtttatgctacaatatcaagatatctgatttaatccatgcatctctgaaggatgtattggtttcttatttcttttaattgagagagttgttgaatgatttaatagaactttggaattttcaaactgaagtgatatttttatttgctataaattataggtgctttctttgtatgccattttattccctaaactggtagcattttacagatttaatagggcctagatctactcttaagtcctgaaggtataatccaaataatttagaaaattgctaagggcattccccaggtcactttactgtgtaattttttcccaagtatgttttgcattttaaatgttttcatttttcctcttaatcttgttatttatcagtaacacatgatgtgttggcatcttctggaataacacatttgttccaagtgaaaaggactaggtttagaaaacctagtcggccaagaagtttacccgacagaaacctatgttgaatctaaaattaatgtgctcacattttccatcaaaatgaaaatggaatgaagccaagaaagcactatgagaagaagtttgttggtctctgccctgcatgaacagcattaacaaaatatgtcatttagtcttgtaaataatagacgtgttgaaaacaatattttacctttaagtctgagatgagacacaaactctgattatgttactcctccccttaagcatcattttattacatctttaagcatataatgacttgaagaaaccattttttcctttggtttatcaaacctttattaaatgtttagtgtcttcaaacgttgtgaaatgccctgtggatttaaggaaaacattcccagatggaggtcgcgggggcaaacaaatacaaagaatactttgggaacggataggtgtgcatctgacttaaagggaggtctgaatcaagttgagaactaaaggatgataaggcatttagaggcaaagaaaggaagtaaacaagttccacatagagggaccaacattcgcaaaacacccagaaagatctaaaagagcatggcactgctggagaactgcacagggtttagtgtcactgcagagttggaggtgaggggtagtgagcagctaagttgagattttaaacaggggaatgatgatgaaggtttgtgtagacacaggctaggaaccacatgtttttttcctgtgggtgtgtagatccgtggctggctcttgagaagaaaagtaacataatcgtatttcccgttttctctatcacttaatggcagttccatccttatagttaattaagacaaaactatattatgcttagcttttccttgtctctcacataatagacatggctcactggaaaattagtcagtactgtctacattgggcatctgtgtgtaccacgtccaaatcctctttgacctacccgtgactgctgtcagggctacagccaccagttccatggagacattgcccagctttgtgaaggtggaactgaacactatctcatctcctggcctcctgtcatggaccctctttgatgcagcacatgggatgctaggagcaaccattctatactcatgtataacctgcaatgagggctggttaatggcccatgaaagcagaccttaccagtgggggataggaactgagaggtaatcacttctccttttattccatgggttggctatacttggacttgtttcctttagtgagattgaactagataacttatccttgaattgccattgtttcctttgttatttcacaaccccagtcacaaacttcaacttcctgggatgtcattcccaaataaactcactctatgcaagcagttgtcttaggctttactttcctgaggaaccaaaattatgaagtaccttcaaagtacagcaagtcctcacttaatgttgttgataggcttttggaaactggcactttaagcaaaatgacatataatgaaaccaatttttttcatcagtgttataatggaaatatattgtctcacttcactatagtgacatgtattttgaagcttaggtttttaccaataggaaatgacattattttgctgaaggaaatgacattaaggacttgctacacattgttttgcttaaagttgcaatttctaagaatctatcgacaccattaagtgaggacttattatatatcttgaatctgaccacttctcatcacctccaccactaccacccatgtccaaaccacagtcagtgtttgccttcattataacaacaatctcctgactggctctctgctttggtttttgctctctatagtctattcttagcatagcaatcagagtagaagttttcagaaaggcccatgaagatctgttccccatttcttgtctgacctcaccatgtactactgttattcttgctggacaaactggcacctgttactcttcaagaatgccaggtgcacttctccttcaaggctcttgctcgacactcctgtctagaacacatttccccttttctttacaactcactctcttcatccttcccttctcaaaactgacttttacatggaggaattctagctatcctttttaaatcatgactactcccaataaatctgtcctgtttcctactttatttctctccaaagtgcttagtataatttagatatctttatgttgttttatttactgtttctttttctccattgactgtgagctgtgagggcatggaatcgtgtctgtttctttctactgctatgtccttgggcctagaacagagcctggtacctggaaggtgctcattaagtaattgttaagtagatgaatgaatggatattttagaaactgtaattttggccaggcgtgatggctcacgcctgtaatcccaacactttgggaggccaaggtgggtggatcacctgaggttgggagttcgtgaccagcctgaccaacatggagaaaccccgtctctactaaaaatacaaaattagccgggcatggtggcacatgcctgtaatcccagctacttgggaggctgaagcaggagaatcgcttgaacccgggaagcagaggttgccatgagccaagattgcgccattgcactccagcctgggcaacaagagagaaactgggaaactctgtcacaaaacaaaacaaacaaacaaacaaacaaacaaaaactgtaatcttagctgtggtgtaaagaaggctaaaggaaggtagggatagagaatggaaattaggaggctgtgccgtcaatcaggtaagaaatgatgagggcctccttttggcatcttcttaacgtcatcaatggtgagaggaggaaggattacagaaaaatatggaagattaaaatgattgagttgttgatggattgggcatagcgaatataagagcagaagagatataagaagactcaggtttttcactttggcagctgggtggatggcggtgatgttcatcagagagaatgctgaagaaagagcagattttggaaagaaagggatagggtggaaagccttcttgaaaaagaagagtaacttcagagtttgttgagtttgacatataaacaagacttcttagtgtcactaagatgcttggtagtcagttgagtgtgttggcctagggctcaggaaaggatactgtagggtaaactagtgcctagtgaggaagttttgccttgagttagtctagtggccttacaaaaaaacaaacaaggaggacccatatgtaactcactgtgttcctgcaggagcatagaagttcttaatcattgccactatttcttttctagattatttaaaaaatagaaaaagaaaactttaagaaataaaaaaatgtattgtacattttgaaagaaagataaaggcatttatcttaagacaaaacgcctgagtatctctagagtacaaggaatttacctttagtttgtcctggctagcctcaaactctttattttgctttcatagccatttccttttgttgaaaacatgttgaagtactttttcttcttcctttagtcaccagaaatgagtatgttctatactaaaacactcagaatccatgtaatgaaaaatgtctaaatgtttcaagtaagatttttggtatgtatgtatctgtttcataatataaaaattttaattgttgtattcttcaccaacacgtttttcatgtattctgaagcttaggtttttgccagtagctttcatacctctggtgattttattaccttatttaatagaggagagtcaagcatcttgaactggtcttcaatttagaaatttattaaacaatttcatttctcaagggagcaattactgttggaaaacattattatatacaaatctctgggccaatagaggatagagatgagaaagatactgcccaaggaaatttatagaaactaaattaaaacaaaaatcactctgtctgatcagtaatcatctcttagttggtgaatataccttagctgtggatgaaatctttgacttatttgaatggaatctttgctgtttaatctcatactgatactttgcagtacactaagaagatgttaatggtttgccagtctgagcttacattggatactcagtgggtcacagagttatgaagggctatgttgccaaaattgcaatcagtaaagcatagattatgaatatatatgtgtgtttgtgtgtgtgtgtgtgtgtgtatatatatatatatatatatatatatatgaactctatattgctgacaatgaaattacagttcttgctttcttgaatggaagaaatcatgaaaaccataattcaagggcctgagatacttcagatttagttaaataaccctttgtatttgttttttaaaatgcctggttatttgtatttgttttttaaaatgcctggttatttagtgacactttgttaactgttaattggggttctccagagaaacagagccaataaggtgataaggcgtgtgtgtctgtttgtgtgcatgtgtgtaaagagatttattataaggaattggctcacttgattctggaggctaacaagtcccaagatctgcacttggcaagctcaggacctaggaaattggatggcatggtttgaggcagaaggccagcaaagtcaagacttaagcagaggggaggtttcagttcaagtgcaaagaaaggaaaaaaagcccatgtcctagtatgaaggcagtcaggcggggctctcttactttgagaaagggtcagcctttttgttcaattcaggctttcagctgattggatgaggcccacccgcagtagggagagcaatctgctttacccagtctatagatttcaatgttaatctcatccaaagacaccctcacttacataaacactcagaattatgtttgagcaaatatctgggcaccttatgtcccagtcaagttgatgcacataattaaccatcacaataaccaattttaagttcattcacatttattcaatcaggaagcatcttaggcttagctctagggattgagcaagaaggtcagacattttggttattctaatgaagtggaagacaagtgtcaggtaacacttaatagagaccagaataaagtttaataaaatgaggaaaactacaagtcttaagtagttgtattcttcaccatgatatttttcatgtatattgaaactaactatatgggattaaaattccgtttcttactctgaactttaaattattaaacagccattaagaaaactacatacttatgttttagttttatcctttttacattttgtttatatcaccatacatattcatttggaaggtggtagaataataataaagtaataaacacagtgaagaagcaaaacaaattatttcattaatcatttttaattaaaaattttaaaaaattaaaatgatttaagtattctgaatttggttcatattggaaattacagaaagagtctattaaataagcataatcattttcttgagttaatattcatcttctattttcttcaaatttgaccaatatgatatagctcttgcttttggttgcatgatagtgacaaggaagctacttcacagttgagtcttttatgaaggtagctttctaaaaatctatctgttatgcttcttggctggggaaacaaaagttctaagagataagggggggaaatcattgctagaaatagcaaacatagttttccctcttttacagatttctttttcagcagtgaattagaagtggcgggctttggagagatttgttcttagtaagttaatatttgacttgccaagccatttgggaacacggaattgccatgatatcttctgggcatctccccggttttggcaactaggaaacattcaaggctgtgacttcatgaagagaagtttgtctgtgtgatattatcctgactgctatgcaacattttggtgaatgttttctttgtagacacaaatccagtgtgaaaaccctttttttatgaaaaaggtttatggcactttcatagtagcagggcttgtcttgttgatttagatcaaaatcatttcctcccaacatcataaccattttactgttcagtggtgcagaaggcattataaagagttagtgaattgttttggatccttcagaattggatgagggactgaaaagaagaaaatatcaccaacagagatgatactctggataacttcttcttaaggaaaaaaaaatattttcacactgagaatttaagtgttataatgatttgagcctttcaataaacatctaatacaaaaccaaatgtttacagttccacttagtctttcttcatgcctatgccactttaaagtcttactgttttctctctcagcttttaggaatgggaaacaggacttctgttaatgtctaatgaatatttatgaagtcctttgacaattaagggctcattagaattcacttttaaagaaagataaaaacacttttaagaccaaagcagaatgtggtggcatagaaacttgcatctctctttccttgttgtgaattgtcgagataaacactctacaaatgaacaaagtgtcttttaaaagtgattctaggtaggagtttgagtaatatagacatacttgattattatatgatgactttaattttgcattgacttttgccttggtaagtgttttttttttactgaagatacttggaaatcctgtttttttactgaagatacttggaaatccaaaagtggctttggagtcactttttgtatttaaatctcagtttcagctctttcttagctctgtgactttgagcaagttcttagtgcctcagtttctgtattgcaatatgaaaaatacaatactactctttccacagcttcttggaacaagcaacttagttaatacatgaaaaatacttagaatagtgcctggaacgctggttttgtttgccttgagaaatctttcctttcagttcacatgctttggccctactagaggcgcttggaaaggcctttgttttctccttactcggggtggaggggtgcacaggaatagttaacgaatcctcactcccgatgggtggcatttttagttttcttcttcattttcatttttcgtcattgtttttttcctgaagaccccaaggccctgtcctaccacttccagctaccttggactgcagctgttctcttggttctaatatgatacaaataatataaggatgcctaaatatatattcagtcactttcaaaagcacagtcttttatgaatgaaaaattgctaaagtaaacaaagtactgtgaagctagagtagttatgctgtttttgctgctactctaggtaaattactgttatttagtaatggaaattaaaaaaaaacctggacctgagtttggtaatggaaatttaaaaatacctggacctgaaatcagatagaaaagtcagaaaagttacatgcctgctcatgattattttaaatatgaaatagaggtatgttttgggatgagcaaagaagtaaagcatccatctgcatatttctttttttcatgaggcttaacatttgcagaagtaggcactgacctggaaaccaaaaatttgtagtcttgttgataaatgtattcctctaaagaacatcccacttactcttaagtaatttaccatcctgctttacacactgtaggtcttaagattaaatgtgtctttctaaagtgctgatagctgttatttaactcaaaccttatctttaagacaagcctcataaatttaataataattaggcatagtttccactggaatttttactgttttcaccatctgttcttctcagagtctgtataaaaggtattggatctgtttcacagtaacttagtaaatattcacttctaataattattttctattggaaagtgactgctatacttatgatttttaggcagttaatagtgaatctattgttggtctgttttttagatgcatgatagcggtactttattttcacatgttgtatgtagacgatatattaatagtattagtagtatgatgctaatgaaagaatataatcctgtatcatttaatagccattgtgtacttgagtgtttatgcccagttttgattgttgtttaatttgcctttataattcttacccatatagtcctcagtttggagtagaaagactttgtagaacacagtcaattatttccatgtttccaagtaggcactcagatacagtggtactagttggcctgccttttggtttatattaccgtaaggcttctgtctctcatattttttgagagaattttcatattctgtctctcatactttatagaacacagtcagttatttccatgtttccaagtaggcactcagatacagtggtactagttggcctgccttttggtttatattactgtaaggcttctgtccatagctttctttccccttccatccagccactctcacaagcctgatgtccattctttttttttctagttgggctgaaggatcagacttgttaatttgtctagtgcaaagagagaaagaagagaagacccaggcattgaactatgaatatcctgtaactataaaacaaggcatatttttgtgtaaatactaaaatgtacagaagacattcaaaaatagtttctaaattgtatgcagaaatggaagtgttcagtgaataggcttatttcttcccaagagtcctaacttgacttacaaccctcatttcactgtatgtgtagtaaaattttaggatgaactgatgctttgatgggagggatgagcttaatttgtactctgcaggaatccattccaactttattagtattatacttgagattggtcttatgctatagttagcttgtcttttttagttcattataataatgtatgtatttgctaatgtaaaactactatgaaaagttataatctagtctttaaaaatactttatacttagaaatttaaatgtctttcttcaaaaatttgcaagactgaaaatcagagttggatgcatatgtgagccagttaacatcaaacaatgaagtttttgaagattgtagctaatagtagtatataaattgctcacacttatatgaggcaaactgttctaggtactaaaagcattttacatatataagtattattatcatcttcattttacagatgaggaaatgaaagttcatggaggttaagtaaattgtctgaggtcacacagctaattatccaagtaatcagtggagtgactcatatgtaaataaattatgctacttggaataagagggaggtagttggtaggccagaacatgtgtgtgcaactaaggtagagtaaaatatataacacagtaaagttctgtggaaacgttaaaaaagaaacacaatcagaattataagcaaaaacatgggaatacaaaaacatggtacatctaattagaataaggtatggatagggagcagactatagtagaagatgaagctggaatggaagattgaatcagttcatgaagaacattgaatgccttcctaagaaccttagaactgttagagatttttatttgctttactttattcgctttacaagcatatgcacgtgtgttgtctttagaaggcagcagtgcaaacactagatgatagaaatgggaaggagatcagagagtattacagtaacattggttagggacaggtataacggtaggagaaaggaaagactccagccaatagcttgtattttgtagtaatggaacacggaagacataggaaaacctatccttcctactgggaaaaagagaaatcaaatgtacatacaccggctgatggtgatgtagtattattactattatggagtgatttggtaaaacagtaatgtgcagtagtgagcatcttagctccaccttaagaccctatattatataggcctcagtcatttagacaaacgggaatacttgtgtctattttgccaggctccgttaagagttatatgaaaacatgtgaaagctgttagaacagttttcacctgatgtaggcactcagtagttttccttcattcattgatggattatttcatgaattattatttgtttgtttgaggcataccaagcacaaagcgcacaagcactttgctaatggtttgttgataagccactttctacgtagaatttttagattgtcttcataaattttaaagtgaatgtgatatttcctatgtatgctcttcctattaaaagatggtaaattagaatttagtaaagttatttaactggcttttcgtgattatatatcatggaagaactgaggtaaattattaaatgtatgccagttttaaaacctagttaacactccatgaagatgttatagaatgtgtgtgtctgaatctgtttaacatacacatatatattcatgtatcttgcaaaatacaagatgtaatgcaaatatagaatattgtttaaaatatagctaatatcatctagctttgggaatagcttataaagtgaattgaatatggcacacagagcataccattttaaaatgcatctatgtagcacttggaaagccaagctgatattatgtactaagcagctgtaaatatgagtcagtaacatgagtatgcttcacatagtgtgtactgttctccacgttggttctttatgcagtgatacagatacttagcagtaccagcaggaaccatgactatggaatttccacattattgtcttctaagtagtgaaatgatgcaacaaagtagaaagtaacttcaattagctaaaattttaaaatatgaattagtaccagtaggtattaccagtgataaatacttggaggtcatctatcacactctaggaagtagtcttgtgtgtgcatatttttaactggtatatatttttaaattggttctaaattctggtagtggctttatctatatgcagttgcagtgaaacttactttctttttattgacaagttttaagtcatggatttctgataaatgaatagaactaacatttattggtcatttactgtatctcaggcactgggctctgtactaagtgcgttatatcatacttcctttaattttaacaacagccatgtgagaagtaaatattattacccctgttttcaagatgaagaagttgaagtctagagaaactaatgaatttagtcaaagccatacagctaattagtctagcccatgcactttcttctgtaatgtgctgccaaggttacattggtactagaaactgtgttcagaaccctctcacatgcatgttcccatgtttcactccttatttatctaaaacataatttaaatgaaatggctctgtcaaaatctgtatttctttctttttttccttactatttttgagacagagtcttgctctgctacccaggctggagtgcagtggcacaatcacagctcgctgcagcctcaacctcctgggctccagccatctttccatttcagcctccaggatagctgggaccacaggtgtacaccaccacacctggttaatttttgtatttttttgtagagacagggattcaccatgttgcccaggatggtctagagcccctgaactcaagtaatccacctgccttagcgtcccaaagtgctgggattacaggcctgagccactgcgcctaaccaaaatctctatttcttgagtttgaaaattgtatgtcagaaggaaggggaaatgttagaaaaacccagctgtattttcccctttcattttcaattttagaaagcagagattttaccaaatggcaatcgcaatagaaaatacacacaattgagataggacagaatcataaatgtatgtgaggtaacggtgtttgttccttttgtcttaataggtgatccatgaggccttcacaatagggaagttgttctacgtacctcaagaaaactttatcacgtgcgtgccaggtgcctgacatgattctagatgctgaggatgtagcagttagccaaagggatataactcttgctctcatgcagtttatattctaatttggatattctaaatatttcatgtagaatgtcacaattaagatatcacataagaaagatactttcagagcttctctatttaataatttcatgtaggaaaagaaggtctccttagtgtatcttatctttcagacctttatatgtaataacatgatttttcctaatttagaattaacagttttctctagcatgtaagaaaaactgacttgtgtttggaaatcaagacctaagttcaaatcaagacataaacacacataaagttagggaaaagtttgtctctctatatatacaatcagttcttcagtgttcaggtgtgaaatgaaaaaaaaaaacatgcagaagaaacaaaattctgcctgtgataacttacaacccaaaacaaaagctatcaaataggcaaacaaaagcaaaaatcaaccaagactgattcgttccacatttgagaaactttttcttttttaaattacttttctgagaatgtgaactttctgtatatgcttgtttactctcatattaatgattcatttcttcttttcccaaatatttgccaatacttcataactggctgaatctaagaggtgctaggttaaaaaatgaagactcaggagcttaattgtgccatttacaaataaaagcatttaaagtacaaatgaaaagctctgtttagatctcaagaggttcaaaaattacgttttcttaattcttttctttttaaaacaaatcatctcttatactcactccgttctcttccatcacagtaaaaatgccttagcttatcttaaaatattttatgtatgtatgtatgtatgtacatatgtacgtatgtatgtatataaagtcttgctctgtcgcccaggatggagtgcagtggtacgatctcggctcactgcaacctccacctcctgggttcaagtgatttacctccctcaacctcctgagtagcagggattacaggtgtccacaaccatgtcggctaatttttgtatttttagtggagatggagtttcaccatgttagccaggctggtctcaaactcctgaccttaagtgatccactcaccttggcctcctaaagtgctgggattacaggcgtgagccaccacacctggcctaaaatatttacaaattttatatctctaatgctaatgactggttattggtcatctattgtgtcagttttcaaagtatgatttgccaacatagtaatattaacatgttttactgacatttgcactgataataaacacccgagctttagcacaaatcgaagcaggaaccaaactatatgtgtattcttcactccagtgtgctcacagtgaaaacaaccaaccaaaccaaccaaccaaagaaataaaaggaagcttcatttaagaatatccttaatgaagcaataaaatgattaattttattaaatctcaacctctctgtaaatgtctttttaatattctgtgtgacaaaatgtaaagtgtgtataataaaatttttcagcaactgagaatcaatggttattgatatggtttggctatgtctccacccaaatctcatcttgaaatgtacttcccataatccccacatatgtcatgagagggacccagtaggaggtaattgaataatgggtgtggtgatgttcatgctgttcttgtgatagtgagttctcatgagatctgatgagtttataaggggcttttctgtcttttgcttggcacttctccttgctgccaccatgtgaagaaagatgtgtttgcttccctttccaccttgattgtaagttttctgaggcctcctcagccatgctcaactgtgagtcagttaaacctctttcctttataaattacccagtctctggtatgtcgttattagcagcgtgagaacggactactacaggtgtcttgagacttcattaaacaaaatttttactagaaagaatgactgacagaaaaactggttattcagacttgggtatttgcagctatattctcagaaatgaatgaattgagcttgccagttcaaggaaaacagttgacagtatttattgccaatgataaaactcagactttcaagcaaaagttaggattttgtgaagcttttatccacataactgatctgcataactgagtggaccaaacatttttttttccagatggccagtgcctgttgtttcatattcatgcataggtaaaagatcagtttaaaatacaagatggacagtaggtttaaatttatcagaatatgaaaatttcattgatagggttttagaacctatattgtaacttttaagaaactccgtgatgtccaattttagtgtatattaaagaataaccactcatatgaaaaggctattaaaatagcctcctaactacatgtctgtgtgagaccaattattcttaatatgtcaatcacaacaacatgctataacagattgagtgcagaagcaaacatccagtttcttctgttaaattagacgttaaagagttttgcaaaaacatagagcaatgccacagttttcttgaaaatatgttaaaatataatgggtttattattttttaaaaatgaattatacttttttattattattatactttaagtttagggtacatgtgcacaatgtgcaggttagttacatatgtatatatgtgccatgctggtgtgctgcacccattaactcgtcatttagcattaggtatatctcctaatgctatccctcccccctccccccaccccacaacagtccccagagtgtgatgttccccttcctgtgtccattgaattatacattttttaactgttcaatttttttttaacatagtaaatatcgaaaactgtatccagacacacagaaaatttggtatcctcagtcatttttaacaacgtaaaagggtcccaagaacaaaacatttgagaactgctgtctagaggaatcactggttttaaaagtcgcagagcacagagctttacttccaccttgtctgctgctcagtagtttgcgctcaggcaaataacctcttccagctctagtcccctcatcatttgtaaaatgagagtagtaacccttacatggcagagtattttgaggactacattaaataagatttctaaacctgtaataggggataaatgattacatctcatttaatctcccaaactccataaagtgtaagtattgttgctgtgaagtgtttgagaccaatggaaattaagaacttgcttaaggtcccaaatagtaaatggcagatctggaatccttgttttattaacgtaatattcagtacccttttttcatgctgtagatttgaaaaaagagtacatgtaagtgaagtagaagttacatagaatcatgggtgtggtggctcacgcctgtaatcccagcactttgggaggccgaggcgggcggatcacgaggtcaggagattgagaccatcctggctaacacggtgaagcctcgtctctactaaaaatacaaaaaattagccgggtgtggtggcgggcgcctgtagtcccagctactcaagaggctgaggcaggagaatggcgtgaacccgggaggcggagcttgcagtgagccgagatcgcgccactgcactccatcctgggcgacagagcaatactctgtctcaaaaaaaaaaaaaaaaaaaaaaagaatcataatatgtttgaagtacaagagaggttagagaatttatcttcctacaacctcattttattgataaggtaactcagggcatgcaggtacaacaatgtgacccctaacttgctttgaagctggcaatatttttaacataatcatctcattcctattaagcattcttttttattttttgcttgaccacaccaaaagagttcaagcctctttggcaagaactgtccttatctgttccacaaagatgccaatgataacaaaaacagattataaagacacagaaagatcatggtaagtaccataatcatggtaaataactataatctatggctacaggctgatatttgttgtagaagcaaaaaaaaatttacagtgtttttcaaaccttagaagctcaagagttagaagtttagctgaagtgatttaaaaagggtgtgtgtgtgttagaggggaaaaggagagagttactactgtaataaaaaagcgaaaggaactggaaatatttggaacaggaaagtgcttatgatattcagggtcagataactcatctcctcagagcagcctaataagatttcaggataacacactattttttggtgtttcttagtattatactatgcatgcagatgcttcaccttcaacccaaagataccttatggaggatggaattaagggtttggtttaccactctataaccactccataatgcttatctctttttttgtgtgtttcttcataatttcttcccattttactaagtagaatgaaaaacataatcacttgagttaatggtgcagtattaaactatatttttatgtaattaaatatattttgtagataataagctcaaaggaaatgcaggttattttcagattactctgtgattagtttaattttggaaattcacaactattcacttttggctgtatgtcctgacattttcccctttctctaatatagtaaagtcttgtttcagtcctttcaaatcccttcctcagtaaagtcactaacgtaaactcaaataattttatatgtatgtaatattccctaaatatgtaaaagtggatgtcagctttaaaatctacctgaaattaggttaaatcagtgacattcatacatatatctaacttatgatatatatctttatatacacatgtataaatagatttatatataaaaaattttatatattttatatattcagtactctgtgtatgtacatgatctatacatatctttataaatttatatttatacgtgtgtgtgtatgtatatgtatgtgtaggtgtgtgtgtatatatatgtgtattgtgtatatatacatttttttcatgtaaatgattttctagtttgtggccagggcaggttcagatttatttttatccctctataatcttaggcaatgggaggttagatgcccttttctcaaattttgttttaggtaaaggtagagttggaagcagttagaggtgtaacatgttgtagtgttttggaatattttgaagttaccagagtagccactactttgtgtgcatgattcctttctttagaaacatctattaccctctttgttacccatccagggagtgtggtcatgggaaaagcaatccccatgcggcattactacattacagtgttgacacagggacacttcccttgcactaaattcctaatctaggcaggtatgtttgtctaagtcttttccataatctaattcattcactcagtattaccttaacaaatgtatcgtgagaacctgtgtttacaacctgagtcttatttggtgaatcatcactgtgctggttttctaaccaagacattctggagatttctgagacagtagcatagctagagctagaaatcatgattcctacacctgcttggagtgtagttatcctgttacacgtgtgacttggcctattgaaagagctggtgcccggttacatgttttgtatgtaagtttttacattttgatatgaaggcctaagcacaggcatctcaggttttcctctcagagttctcatcccctttcttccccatacactcattttctctttgttgtaaaacccttctttagccaggctggtctagattgagaaaatgactctttgatcataacccaagaaggaatgtatcaaagcaaaccatcctctgtgagagggactgtggccatggctgtacatctgggtgtgtgagaagagatgggatccagcagaccaatggcaggtcgctcccctgagacagcaagcaaggatgaaagacagttcgcaaacaggagttgcttgtgaagtcgagagaggcaaacaggaacatttcacacctgctgtttcctgtcctctcagtgtgtgcaggagggaagaaaggagacatctgggtctcaaagaataccaaagtttttgagaaaccactggaaaacaagaaatcaagaaggaggcagaaaaggatctcagatcaaaaagacattctgcacataaactcaagtagagagacacttggaccactcccggtccctcaacttgctttctccatgcattgtggaatgttagtaatgaaggtctctgggttcaccgcttgtgaggaggaaagtaatgctgggaaacttgatatgtgtaaatagaaaatatataagcaaagttatcagccagtcttgatgttgcagcggaagttgagagtgccgtggtatatcctgttttgtgcattagctttttctggggcatgagcattcaggcattttatgaagaacttagaaaaagtgaaaaatattttgaagttttatatttttgatcattagctggaaggtttgtccagtagtaagttacttgtgaggtttataaaatattaggaacatttggcaagaagagacaggttttgtgggaataatttgttacctgttgaccctcactgtggacatatttgtgtgtgtgtacctgtgtgtgtgtgtgtgtgtgtgtaaaaaggagggtttataaaaatacaaaatcttttgaatgaatgttaatatgtttgacagttaattttaaaggtataaactgatatgattattctggatcattaataaacattcataaagctatgactattaggtcattttattggtggaaagatttttctaatcttgattggcatcatttgatagcaagaatcctttcttgtccctattttttaaaaattaagaacatgtcatgttcgttgctgtttgtgtttaatagaggttttgaatggcaaatacaatttttagcttgaacactggtaatttcagatatgaaagtaccgttgccatctttctgtgccaggcttgttacacagcagtcaaaatatgtaatgtttttcttaagacccatagccattaatgcgaaccagtattcttaagcatttgttactgataacctaacatttaattgtttgtgggctgtcatagttttcatgacatgacaaaaacttacatgtgttgatattgaatattttattgttgttcaacctgttgtattgtcagtgaaacagaacagaggaggtgatactggagaaaacattaaaggtttactaagaagtggcaatgagtttgatgttagtagaggccatgcctttgaacaatactgctaaggaatagatctaatgagatttgggatgttttaaaaaattagtcagcattagtgtaatattccttcagggagcatttgtaatgcccacaagaatgtgtcggtagagagatcagattccaggctaacctttatttgctttcagtagttgacataacacacacctgtgtgttctctttgctaacctcaaaatagttttgaaaagcttttgacatttggaaatatgaaagagagaagattttgatttgttttctggcaagtaggaaaaataaattctaaatgttgtgttttacctatatgtggtccttggagtaaaggccttggtgtgtctcatatccttcttttttttttttttttttttttttgagacagagtctcactctgtcacccaggctggagtgcagtggcacaatttccactcacttcagcggcacaatttccactcacttcagcctccgcctccaggctcaagtgattctcctgcctcagcctctctagtagctgggattacaggtgtgtgccaccacacctggctaatttttgtatttttagtggagacagggtttggccatgttggccaggctggtcacgaactttgtctcatatccttctaatcaattgtggaataaagcctctatggttccatgataaattatatttaattttatagtgttttccttgaagcattttaacatgctagagatagatgtgtgtgtgtgtgtgtttacagttagatgtaaaatagcactcgtgttttcttcttgaagggagtcatttagaaattacctctcagccaggtgcagtggctcacacccgtaatcccagaactttgggaggccaaggcaggtgaactgcttgagtccaggagttcaagacctgcctggacaacatggcgaaatgccgtctctacaaaaaatagaaaaattagccaggcttggtggtgcatgcctgtggtcccagctgctaagggaagctgaggtgggaggatcacttaagcacgggagattgaggctgcagttagctgtgattgtgtcactgtactctaacctgggcaacagagtgggaccctgtctcaaaaaaaataaataaataaaagaaagaaaagaaatgatctctcctcatagtttgtgtgtaggaaaagaagtgataaaactgacctaattgaacttcaccttttgctcagtgacagataaagctttccttgatagcatacattggctcagtgccagtagtaccataaatgttgtttcttaagagaatgtcaagtttcagtaaatttactttgaacttcaaagtagtgtgcaataactttgataaataagccgatcttatgaaatttgaaagttacgtttataattatattataaaataaaatgttgaattttctgttttaacttccctgatgtcccatattgattttattacattcacagatttttcttttcaaaagtaagcttcacttggtttgacatcagcagcttatttcttgcaatctatttaattgagacttttctgctgtttatcctaaaatgcagataaatggctttcagcacactgtttatagtataatagctcctgaagtgagtcagcattatcagctagagtctccatgtcataactaatggtctctctgcttatactttcctgctagtgaggagccactgaactccacagagacaggagcctggcatagttgggggtgggtagattattttgatggtgcctataggacaaggcttttttcctcctttattggtgtgaaatgagaagagaaatatgtccttatcatgattttagcatgctcaaaagtgccatgttctaagactggggcaaagaacttttaggatataatgatcctagagggatttgttttattccagattatctgctatgtcataatagcacaattttaatacttttctcttgaggctgtttgacttgctgctagagaatgggagccactaggaaatatttgtattactaccaaatattatgggcttaataataaaagtgagtattttttgtttcccaagaaagaaagaaactaaaaaacttcaattgttaactaatcatttatcataaatcgggcctattcattttgaaaggccattaagttttttctttagaggaaagaagaaaaaaaaaagctatgagactcctagtgaagatcaacagacttgaccatgagagttaaaactgacaagttttgccaccctgtaattctttgctgagtttttacatagaagatagaggattctgtaggtaaatacagggaatagttttcataactgaagtaccaatgaatacaatttggtaaaatgttttgtttgatctcatttgttcttttagaatgtggaaaattttgactgaagtggccattaagatagccatggtcctttgcccccatattagtattatgattgtttgggatcactttggtcatttaaatacaatgtatttatttcttaactcactctgataatgaaatttaagataatatatccaacttcttaaaaatatttcaaggtggaaaaacataacacacacaaatacatctaccttatgttggtgtggcttaaaatacagaaatatctgaagatagggtttgtgaagggtaattatttctcacatagcatcccagatacaggctttttgttgttctttttttggcggtggtttgtttattgggagagcccatattgacagttatttaaaagaggaggaaggaaacattttgaccttagggtagagtttatgggtgagaacattactggcataaatgagaagatatgaattcgataaaagaatataaagaaagaaaatttacaggtaaaattaacaaggcttttaaagactgggaccactgaggtatactgggtgttatacaatttaaaaaataagaatataaaagtgctttaggagaatgttttgaaaactgaagccatttatttatccaaagagggagagcttgagcagcatcaggccagaatgttcctgtgtgtgccatgcccagattgaagataacacaattattataataacatagtttcaattcagatctctccttagtgtttctgcccagaattcaacaagattgtcctttggcagtcttcttcctacaaatcaaagcaaagtagatggtggttcagtatttcagcctattaagtataatttcaagaaaaaagatttatcataaattatcaaaactctatgaactctagacttacatatatccaggttccaattcaactgtcttattttactttggatatagactaatggtagaattaggggaatactagtaaaacatcttacagcacacttcttgaataccattcttctttcattcggcctcagggtgttactcggaaattgaaatgcagtattctaacccaggtgtttgaatacaagggaaaactataaggtttgtcaaattctgttgagagagaatgttctcatgtacacaggaatttttgttgaccctattgattttaatacatatcctatgcatatttttttctaacaaaatttttaatatactttttggctagtagggaattagtatataaacagcaataaaaaataacttaaaatgtttaacatgttctttaatatatatatttaaattatagttacattttataaaaattatatttacattttgaattgatatattttcttcatttcagctctttttgtaaaggaattttttggtttgtttttaaccatctgctgttaggcaaaggtatctgttttttggataagatttcaggtcatttgtttaaagtggcacagatactagcttggaggaacatgattttatgtttatctatagtataaaaggaaatagagtgaacctttggtgtgagtgaacaatcagcagaccttttatgacaaaagaacaacaacaaaattgacaacttttatgccacactctccaaatagattttaaggttcatgaacatagtggccatttcttcttcaactctttgagcccaaagtgcttacagcactttgaaatatttgtgtatggtaaatatttcttaatatttgtgtatgacaaatatctcttaaatcaatatggactagttagaggctttaacttgactctaataaatatttcattctgttttaaccatatatgatgaataggatagctgtgtctcaaatataaattttatatcaaatttttaatgaatcaagtcaaatgatatggtagatttaataaaaagatagaaataatggtattcatttggtcttcagttttccaaacattttgaaattttccaaattttaaaaggaatttgacatttagtaaaggtaaacctctttaatgaaagatttctaaatgtttgtgtagttgattggtttgtgaaattgagattctcttaagataaacttaagacattgcatattgaaatagcattctgaatgtcaaaggatattataaagatagatttctagatatttaaatgatgaattctagatatttttctgccttgcatagacgcagaggtagcttttaaccatctggaaatgttacataacacactgtggtcagtgacatttttttcattctttttcctttttcttttctttctttttttcttttcttttttttttgttttgttttgttttgttttgtttttgactcctaggtttcttttcttttttacctttccactgtcatatgccatgggtcctgaacatagctcattgcttgaccggaataatgtctcttgccagcttataatcaaagggactactgagaaaaacagctgagctgtattaggcaaccacagtctgggctgcatttcttaactgctgaataacatatcacaggtgcaggattagtgctgcctacggtgctgggctttttagtggaaacccctagcaattctgtgcctcctcctcatgtctctcatcctagggagcctggcaaccatatatcaagcgtacagaaatcaaaagtgagtagtgggagaagctttatatctcacagagactgttttttttttccctccaaaaaatgtaagcaagatgagtaaagccaattctggcacaataaaagctgttagaacttagccttttttggcatagatggtgaaatagactaattcaaggggatcaaaaattttgtctaaaaaaattacatggcaagaaaataccatgtagccgaactcttctggtagtgtataatttagcttacttttaaattaatgatgttcttatatgtattattttaacttttgtgttatgtgtgagtgcgtgtttgcccctacacattttcaacactgtcaaggttaaaatcaagtgttgtggttgtataaaggtcttgtggttaaattttttatagtttttgatgttgtgaattcttttactattaatgtatcaactatacacttctaaattcataggttataaaggtctaggtttctttcttgcaagtatgagttttaaaaaatgcaaaatgattctttaaagtataaatgtaatgatttagatgttagatcaaatgaatgtttcaaaaatatagttgctaagatatttattttttaccaggaaggatataaattgttttggcatgataaagtgtacatttggagaagtgagggcaagtatattttagtaattcatatcatttttggtagctatcttagaaaatttttctgtgacgcacaacagataagtgtaaaagcacatgggtggcactgcagattttaaacagttttctttggtttacagtttgttctcttaaaactatgatggctttctaatgtttacattgcattcttattcattttattcctggtgatcattattccatattgtttcaccagagatagacctttaaactcattggtgatgataatagttgataatagtgtttagcttgaaatatatatactatattttatacctcaaatatttaaatatttgaactagcaatatatttgaatattttaaagtcagtaatagctaaggttacctttaacagttttcctattagagggtatggtaaggattaggagcagagaggttctaaatgttttccaggttttttctttggggaaaaagaatagcacaaacacggtgatttggtttctggtttgtctgacttcattgtcacttccctttacatatatgcatctataaaatagttttatacactaggctgtcttgggagtgctttgcaaagctgcagagtaatttttggtgtggaggcaagttgaacatctactttgattagcttcggaactctgtgaagcagagcattcatagaaactgctgaataaaaccatagctcctggcttggaaatctgccaagttctagttgactctgacattattgtcaaagagaccacggttcagtttcttttctaacaatgtggagctgaattgacacattaaatattttaaaatacaaagtcatttttaatttttaatcattctatcggctgagattatgctattttgtgacagtggcttcagtttgatgttgcatatttttaaatcatggttacttgcttgtcaagttaattttgttcttatattgttgcttttattaaaaatacttataaacaagttgtgttttagagatttttcaaaggtttttaatttatataaacattttgattgagtttctctaaattcaaaagcagagtaaaacctaagggaaaggctagctattgttttaaatttaaagagtgtaattatgatgtccaaagaatttttattactatcataattactattcctgctgaggtttataattctatgtctgctgaggtttataattctatgtcaattacctggaaaacaaatgaatataaatgtttgtgttgtctgttgacttgtatgtcatatttactcttcttatgatttttttatgtcatagtctggtgttgtctgttgacttgtatgtcatatttactcttcttatgtttttttatgtcatagtctggtatcacataaaatgtttgagtgattgaagcttttataggtctcttggcagggtttttctgatgtgaaaatgttgaaaacatgattatccatcataacccgggtgatgtgtaatgtcgatgtgtgagtatggtgaaaagagaaacaatgtcagtgaatagaaacactcacaaatattttatgaagccctggtttctagaaagagccagcagttatatttaaaattagtgtgtctcttaacctactcattagtgttgaccatgagtggctgaaattaaaaactggcaatatccctggttttggtggttatggtttccataaaagatactggttgattactgccacacacaaagtaatcttccctcttatgcactcctgtctaggacttaatttggcaattatgtggcattgtgacatctcttttattgttttcctatatgtatttcggctttccatatgtagttgatttgtctcacagtgttccacgtgtagctgatttgtcttacaagcaagattgttattttattgaggacaccgtcaagtactctgggtcattgtgttatgtaaatggatttaatgattatttgctaaatgaatcaatgtaccaagagatgaaagaaaataagaatattttagtcatccttgaacaaactttcagtatgtttcttaagctgaaaaccttatatttttatagactctttgctcaccgtgattaatctagaaaggaaggaaaagtaaaaggcagtaaaatgaagcaaaagaaagaggaattgaggaagaggagagccaggaaggggaaaagataataggggagaaaaggaaaggaagacaaatagaaacgggagataaaggagtagggaaaaggaagagaaaactgaataatagtaagagtcagcagcacataaaacaacaatttattattattgacaattactatgtgcaaagaaccatagttgatgctttatgtggatttctcctccaccccactgcaaccagtgagtactgctactctccacgtcttctataaggaagttagttaagtcacttgctaagccatttaagtagctgagctcgagtttgaacccatttgtctattttaccctacatcgtcatcaagtctagctccactgctcagtgaccatacctgatattgctttgtcatctgacatttcactcctgcatagcatgtccagaaatttagcaccaacatcttcccttatcttttatctgatttctgtctgttgaaggagaaagattcctgtgtaggtaacatcacagttaatattagaaaatctgttctttccctacatatgattttgctctggtattttttaataaaaattgtatttatattttgttactttccagaaaagtttaggcatatgtcccaactttttattaattatttagtgtatatatatataatttttttttcctaaattttttgctgcaaagagcatagaaaatgatttatttgaaagtactttagtataaggaaaaatggttaggtgatgaaaatgaaactcaggcctttagagttgaaaaatttagacagtgaattgagttaaatgattcaaggtttaagtgttgaaaataaaaattagcgattaaactatctgatgtcacaaagttattttaaaaattaatattgttttaaagctctaatcagagttttattcctgtgtgaaatagactcttaaaaaaactgtgagtatttaaactagttttggttaagaaagaaaatgggcattgatttgcattatttgttatcataacggtacaaatagctgtaggatgggtcattcccaaagttgttgctagccagttcagtactttaaaatttttcttccactaacctctttaccctggacatttaaagtgcaaacttgtgtaatatgaatttcaatttctcttcttgcccctgcctgccctctggtgtagaaggtgaagaacagtgatgagaatcaacatttggttaagttttgtgatattcaaagagtttaaaaatgaaaaagataaaggaagatagattattagtagaccttgtatgacacaaaatgattatatgtcactttttaatgaattttaaagtctcatatccatttctaagtgcattacatattgaatttaatattacttgaattttctctactgttcatacagatttttctctctgcatttaaatgtggcagtggattttgatacccttttgactatgacataaaacagtcctttatatcacaaattaaaaattttttatttatgatatttttgaactcataagaatattactaaaactaaatacagttaaaacacactttaggatgtaatggattaattttgaagataaaatttaatttttgtaacattgtactcttgatatgtaatagtatgaaattttttttacattttacttttgttctgcattttgttttttctgcaaaaatcacgtatatgagtatataataatataaaataatatagaaatatttttaaaataaggaactgattaagttatatacattaaagaagttattttacagtgtttatatgaggcttccagctcattattgtccactgttttcaattaaatactttaaagaaattataactctaccttatttcctactacaagagattccatagaaaacatgtacatagctaaaaacatgtatataactgcaatatattttccagaaaagatattcaggatattcaagaaaaataacttcctttttagtccttgtaattgaatggaagtcacaatattgcattctgatagttaggtaatttcatgaaatttgattgatttgcctgaaaaatctgtaaatctatttctaaagaaatattcttaatattctatttttgtattattccttataagaatcataaggaatataatttagtcgtgattcagtaacacacaaacatcctgtgaaaataattctattgtttatttgcacgccaaaaatccaacgatcctctgaaaaatgagaaccaattttagagtggcttccaaaagccttactttttattatcatgataatttagttagtaaactaaactatatatataactatataattatatagaggcatatataactatatatagttatatataactatatatagttatatataactatgtatagttatatataactatatatctatatatagaatatataaatataaatatatttatatttatatataaatatataggtatataaatatataactatagttatatatatatttaatttaaacatatatattcaattaaatttaaatatatattaaatcaaattaaatatatgtaactaaagttatataactttattatatatagttatatagtttaatatatagtatatgatataaattgtatattatatatagtttatataatatagttatatacataactgtatatagttatatatttacatatagttatatatatttacatatagttatatataaaactataatttatatattaatttatatataactaatatatatgtaactatacgtcacaagctaagtgaaccacacatgtgtagtgtctggatttacactgttttaaagatcagttattagagaaagagggaagaagagagaagagaggggagggagggacaaaggaataaaagaaaaaaatggcaaaatggaatgggctcttaacgagtgacttatttgatatagtatttattcctgagaaatttcctgaaagggtaatttttctctgtttttttctttatattttctgtcaggtttattcatgattctgtttttaaatatttattgaaagcctataattatttaaaatgcatttgggaagaaataatcaattttgttgacatttgctttacaattaactagaaactattcactatttgactttctttctttctttcttttttttgttgagacagagtctcgatctgtcgccaggctggagtgcagtggtgtgatctcagctcactgcaacctccacctcctgggttcaagtgattctcctgcctcagcctcccaagtagctgggactacaggcatgtgccaccatgcccagctaatttttgtatttttagtagagacagggtctcaccatgttggccaggatggtctccatctcttgacctcatgatccgacctcctcaacctcctaaagtgctgggattacaagtgtaagccaccgcgcccagcctgactttctttggtgaaaaacttttttgtagattttactctattgatttagtaaacagaatgtactaaattacatttaatttttttaatggttagataccttccagttgttttcaagggttatcattttttataaaactaaaacaaaatcaagtaaaatgaggatttcattaataaatatttatatgagtcaactaaatgtatcttttatctcttttgatggctgcctagtatattaggatactaatataataaaatgtgagaaagtacattcttatatgttattttaatcagatatctgatatttgggatatatcttcattattgctaatccactggatgtttgttagtcatcttgatgtttacatttattatgaatacatgtcatttgtcttttcttctatttattatttcagcatcataattaccaggcaaattcatattttcataaaatgattatttctatatatgcatgtaattacctttttaatgtcatagctgatatgttctgtcttgtttatgatccagaatgcctgacttgtgtctgtgaggctggattttgtacaacttcagtatgacttgatattaaagtgatccttgtataaatacctttgcataattataaagttagataaaacagtgcagtttctcattggcccttttctcaaatgtggagtacacatgaagatctttttttttgtggcttttatttttacttatttatttatttttattatactttaagttttagggtacatgtgcatcttaccatctttctttttcatggttttcttagcgtttaaggtgagtctccccaggttcattctgctgctgcttctcttccgccttgccttatatctgttaacttacacattatcaagtatttatttatttatttttgagacagagtctcattctgtcacccaggctggagtgcagtggcgcgatctgggctcactgcaagctccacctcccaggttcacaccattctcctgcctcagactcccgagtagctgggactacaggtgcccgctaccatgcccgactaattttttgtatttttagtagagacgtggtttcaccgtgttagccaggatggtctgcatcccctgacctcgtgatctgcctgcctcagcctcccaaagcgctgggattacaggcattagccaccgcacccggccatcaattattttaaagttatcaggtgattggaaatattgtgacttgtgcagattgtagattatagaatgtagatttaccaacaatttaagcacacgtgtaaacataacacatgaaaacatggtgagccatcagtggatttagtgttaactaccaagccgtagtcattgatccagaggggaataccatcatgaagattagctagagaagttccttcttggctcgattctcttttggtgtcccattccttcattgttcattgatgtgctttattccacatcaggatatgtgactaattacttccttatattgaatggacaaggaatttgtaaatgcatttaaatagctccaactattatctgtcctaatttgctactccatagatccatgcagatatagaaacaggaatgtagaaagaggaattatggcccctttgaaagtagattgtaaaaatttgataatataaaattcagtattccctgacagagataatcacatttttctaaaagatgcaggattttcatgtatttcatcagtgcttatatggtgatgtgaatccttctatacatctctctctgtttcacgcgcgcacacgcacacacacgcacacacacgttacagtaggtttgcttttacatagttgaaagagatttatttattattttttaacaaacatcctcccaaattctcctttccgcgtagcaactacacctatacctcttttcgttgttttggcattttcatctgtatctctaaataaataactgtactactctttctttattattcaattttaggcattacctttgactttccactatcaaagatgaggatttagttattttttctcatccctgctcctactacatacgtacatattcccatctctcgtctgtataagagtttaaatatttggttacttagtcccctgtgttctcattacaaatgcgtttccaaactcccagtttaaatttaaaatacataagtcgttttattaatttcaacatcttagagttctctcttccaacatcttttgacctgccttcaatgaggcctgcttgctcctgaagtcctatgcaatgtctcatcttattatccacatttagcattatcttggaggtaagcttcgtcttctcttgggatggatctaccattagcaggtacctattccatcttttttcttgtttataccttcatttggaaggaatatctcctccaataactttctgagaaagatacatgggaggtaaatttttgagactcagaaaatattaaaatgctttttttcccctgccctcactcttaatttgcccaggtatttatttctgatttggaaaatttttccctcagacttttgaaggcattgttctattttattctagtttctagtttttctcaacaaagttcaatgccatacttattttttatgtcttttctctttctctccctcacttttcctctctataaaaaaaattagggtgtctgtttgtctacagtgttacaaaattttacagtgatgtggtgtggatctattcacatgggctatatgggttctttcaaattaggaactcatgagttttcattatgaaaattgtgcatgattatttgatgattttctttcctctgttttctcaagtctctctttctagagctaatattattcagatgttaaatctggattcatgctctaagttacttttccatctttgtattttgtactgtgttgtagatttcctaatctttatctttcagctcacctgctgggattttcatttatgcaattatatttttaaagttctttacttgttattctctttttatagcaacgtgttcttgtttcatgatataatgtatttttgtaagatgagagtattaataataattttttaaagtctttactttctttaatataatctacttcttccaagtagtgtttgttttattctcagtctttgaggttttttcaaatacctatttaccctaaattagtggctcatgtgtatgagaatggatcacagaagaactgactggaagctctgttgtcaccagtgggcctcatgtaggataacattgcagagctgtttcactgagaaactcacaagattactatctttatgctctttattcttgacctggtcaaattacccagtaaagaaggcgcgtaccaggctgcattgagttctggaagccatgtggggaaggtgaactggaggaggcaacatccagtgtgaatgttcactgaatgtttgcagtaagatggtactcctgccctcttctgtgcttggtgtcctacagtccttggccttgatggtaaaatagaaaagtaaagaaggcatctcagtgatatgtgtgttgcttttacccttctaatctcctgcaggggtaggaaagaatactgctagcgtgtagggaataggaaaggatatctgaagttctaattactgtatgtatattttcagcctcatgctattttaatatccccttcccccttttagaagtacttttagaagtacctttgataccgtttctggagcctttttggtgttaagcagtaaagctttgcttcttagctttccccccacatttggcttaaaaatcagcttttgtagctttattatcaattcaatatatcagaatttactctctaattattaactctaatatttcattagattattcaaaatttatacaagatgtgcatctaactttctcctacagtttcctgtaaattttgtccagaaaaaaaaatgttgattgcagtgggcacctgtggcatatgagaagattgtcatatgcagaatccgaccttgagccacagcaattttgatcctgtagacaagtgactgcctgtctttctgcttttcaggcttttattttagtgtctcctcccttgatctcatattgtaggctcattttcttagcccctttttctcttattatagtgggatttaataactagaataccctgtaagtaaaaccaaaaattatactataacattttttcttgtcagtaaatatacttctgcatcagcattttaatggctatataggaatcccattttacaaatatacctaatcctctagtgttgtaaatatgagttgttataagcaatattgtgaagaaccaaattttataccacttcttctagacaaattttataccactctttaaataaattcacaatgtgacaaaatcatgaattgtctcttaaaatgtttcttagaaaatagcatcttacttccaatcacatgaggatattttcttttctactttagaccatttggtgtcagtgttccatttaacagcttttcccaccagctggtaaattctgtgtgtgtttaattcatcctagttaaacaggctgtgcctggaaaatgggagggcacccaatacatatttggtagtagacatttgcatcataaatgaatttttattattgtgttttaaagcatcaaaaataaagggtctggtatgaaaggaagcaggaagtaataaattttaaatactctatttttattacttggtctactgaggtgactcaggtcataaaggcagtaacattgagaaccaggtttagaaagaaggagcttaccatgacagggtgagatataggtacacctacacactctaccctggcatagcaagcggtgctgcactcccatgtggacaaacttggaacaaatggctttcaagataaggcagtgacgtgaactatttaacctcactttatttgggaatttaacctaaggacgagcatactatatagaaataatacatgtattgggagtaattgtgtggttggattacatattatttgcttaatctagggtttttctaagtggagtctacaagtaatttgtttcagaattacatgagatcttgttgaatatgcacatttcctggctcgcctctgacctacagaatcaaaatcactgtggctggggtgggattctgcatacgacaatcttctcatatgccacaggtgcccactgcaatcaacattttttttttctggacaaaatttacaggaaactgtttgagaaagttagatgcacatcttttataaatttgaataatctaatgaaatattatagttaatagagagaaaattctgatatattgacaacatattttattgctttttctttcaactatttttttctgtaagaatttgaataattcgttatacatgcagaaggtcaggaaaaattatcacagattaaaaaaaatagacttctaattctctgatggaaccattacctgcaggccttcatttttggtttaaaaatataacaaatatgtggcatatcttatacttctgacctaaaatttcaattttttaacccagcaattttttaatatttttgttgatcttagatttcactatagataagctaaatgtgttatgagagagattttaaattgaaaactgctcacggtgacaatttatgcagttacatggcatgtataagagctcttaccacaacgcctgaaacaaaataggtaataattaatgcatgccctcttctgtgtaacataaacattctaagctcttgacatgaggtttggtgtctataattatctccattttaaggataagaacatgagtcacaagattatttataaagttatctaaggacaactaacttggtaaatagtaaagcctaatgttgaacccagaatatctctttctaagagatcatgtctaccatggtgccttctatcaaagatggtagaaatatcactacagtaataggtaggcattttgcatttccccatgctgatggggaagatgtatcttttgaaatgtgtcttgatattaactaagtttttgtcttcttacccaattttacagattaaatatttctcataatttctttaaaaagaagtacataatatacataatagtacctaaagtagagagactctgtgatatggtagatagacagttttaaagctgaaacaatttgagtttaaatgctgggtctatagtctatccattatctgtgtgcagatctcttaaactttgagtcttaattttctcatctgagaaatgaggatgatagtgtttacccatggaattaccagatatagtagaggttgtctatataatgtctcattgagctccttgcactgtattaaatatagctgttacaatttaatacataaaatatcctcctgaaaggattatgggtctttctttattctgtatgaggtgtatactaggtaaaagacatgattttaatcaaaataccaaaatgtctgtttttctgtttaaatctttaagtatcttgaatacttcattttaaaatgtaatctcatgttttcgtttgaacagaagactggggtagtctaccccacagatgcctaactctcactatttcttctttcagcaaacttccttgataacatgcttttgcgaagtgcaggaaaattaaatgtgggcaccaagaaagaggatggtgagagtacagcccccaccccccgtccaaaggtcttgcgttgtaaatgccaccaccattgtccagaagactcagtcaacaatatttgcaggttggtgatataaatgatttaaagctagctttaacaaaaagtcacactttttcaactatgcaactgtaggctagtgtttcaaagaacacattttagagaacaatgcctaacactatcgtaaactcttagagctgtgcttgtattagagaaatattgaattgtgtttcaccctgaaacaatgttctaagcttctttttgatccctccagacagctcacatacacatgaacacagacctcagatcccaggctcctggtaaaggtgcaaatgccaattattttctttcaaaagacctggtccccacaattagttaaacatcagaggctgtcaaatgcgtgtgattttgtttgtttgtttgtttgtttgtttcaagcattcatcatgctgatgttagtattttggaaagaacacctaagctgctgggaatattcataaactgactctgggaagcagtgcagtggtagagctcatgcgattccccaagttgctaagaaagacattgtccaaatactagaaaatactctttaataggtaatcatgttcttatagatactttataacatttgaaactgaactattttgcctttttcttccttaaatgcctttatgcagctccatccattcctctgatcactatagctgcatttactccttacggtaaggtcaacagtggataaagagctatagcctaatgaggccagtgtgtgccaagagagaagtgggtcagctatctagaagagcacagccctcgagttaaaatgtcagagaagcagagtgtgccttaagcttcaagagagggcgtggacttaaatagaaaggtggactgctaggtttagagcccaggtagaatatctgagcaaccatttgaggcttcattagccagaaggtacgcaaagctgagttgaatgctttttttttttcctttctgagagctttttaaaaaaggtttttaagtttcccatgaagcaaaatctaatataagcttaccagggtattccaagaaccttgtatatttagcacaagaaacatgactgagtaacacagggagggaaacctgggtgtattcataaatatatatctcatttaatcagcaaaacaacttattctcacctttagacaaatgaaatttgggatccagagaggtctagtaacttgactcttgtactacaaagttgtgaccactgaatttttttgccaaggtaaaacgattccaaagctcagttttttccagggaaacactgcctctttatagtaaatagaaaaagtatcaggagagtttaaaaatgtttgaaagaaagcaaaattagcaggagcaaacaaagtagcgtggggtattttactattgtgtcttaagtctgtggtattcagaatacgcctgtgtgtgtcatttgagctattgtcctggtgatcaggattttccaaatattttgtcctgttttcctgataagccatttggatgtcctaagttggtttgatagaaagtgttcagtcagggtatctgcagtggaaattctgttgtgggaagaagcttggcgtgttcaaaagaaactgttttttctagagtacagggagtaggatcagggagtaggaacagtagagcatagtggtaggagctgagacaggaggtatagtgactgtgacctggtgggctatattaagaacgtgatcttattcctaagggtgttgggaagcaagtgaagggagttttgcagcaggagtggtggtagggttgacatgatctgatttgtttctttgctgcagaatattggatgtattagaaggagacagaagtgaattcaagaacagttaggtcagggaaattgaacagtggattcagtaaaatcagttcatgtgcaagaaaatgatcttgagctagggtggtgctggtgtaggagtgagtgagatctatttgagaaatatttagaagatagagctgtatgatgatggattagataccatctaggaggacaaccagagaggctttataagtttccagatgtagatttaaatgcataaggtagacttttaatgaaagaggacagatgaaaagaaccaagttccaatctggacatgatacatttgaggatttttatgtatctgagtagaggtatcagtatgcagttggatatggatctggggctcagagaagaggttgaggagagaggtcaaaatgtgcatagcattagtcactgtttgcggtgaaacagataacctcagaaccacagtggcttataattaaaaacacttatttttcattcaggggtttgtaaggaggctgtatccgtgctgcactctgctgggattaggtgggcttcacttcatgctgctgtttgagtttaggcctgctgcacatttcttcattttttttttttattttggatcagcagctacccaaggcatattgtttctcacaggagtgtaaaggagtaatcttttaaggcttctgctcatattgtgtcctctgacattgaattttccaaatcaagtgacaaaatcaaggtcacagtcaaggggaagcattgtccctggtaaagtatgaagaattgggattaataatagaacaatctaccagtgtatgacttggccatgagacatttaatgcttgggtaaaggggatgtctgcaagatactaaagaattcacaataaagcagtgagtatggtgtcactgaagccaggtttacttagagaggtagtaaggtcagctatgttggatctattagagagtagaataagaactgaaaaatggcaatcagatttatagacactgataactgcagtttagagatatttaatgtagtagagatggaagtcagattaaaatgggttgtgttatatggttgtcaaactttgatttatgacagcaaagaaaaagtaaacaaaaatacagaagaaagaaaaacagccacagtaaaaatggaatccctcaaaagaacatagatataccattgccgtcaacatcaatggattaacttgtagaagttaacagaaaactaatatttattgaatttttaataaatattagcatgtttacttttacctttctttattcattataacattcctataaagaatgtagcactatctatgtttgctaggtgagaattccgaggctctaaaaagttaagtaattttccatagttatgatgatatgatagaaaaattgtggccgggactccaaagtcctgaattcttggccagcggccagttctgacattggttctgaaaggagcaaacattcactcttgagtaaaaggcacatgtattttcctaatgaagtattgattccagttgaatcttcctgtgagctgagatcagtcatatgtgactcacaggggccacatttgtttctttgtcctaagacctatataaatccaggactttctacttccattcctgtaagcacactctactctctaccctccaaatcggtacttctcaggctatctctagtgaaagataattttctctccacaataaattgtatactgatactttgctaaattataataaaaaaattcttagaaaaattaatttttaaaatacttacaaaatacatgctccatttttattgcctaatatttaccttcaacagacataaatttgttcctttagattgctatacaagttttcatttttaaattcaccccttcccagatcagtagcaagcagtttgctgacctgcaggggaacacaccttgagtaatgctacactaagtattacccttctaggtaaaacagtttaaaggataaggttgtattttctaatgtgtaccttagaaaagggctggtctaaattgtctggcttgaggccttgtaccacccagatcttagtcaaactgagtgttgtggtaggtttcatgttcattatcacttccacctccctggagagaataatccaaaaggaggcaagagtgaatagtacttaaaagagaacctgaaatctcacatgctaatttagaggacatgtgcaaggttttagaggcttgtaaactccttttcagtaccattaattactctatcagccttcgccaaggccagagtcattcttggcttgatctctgtcaggtgcagatacggctgcttccaaaatccatgccatttccactgctcatgatattcacattaaaggatgtagtacaaacatagtgtgactgaatacagtaatagagccttttttatatttatatttcaaagtaaggggtaaagccattgtcctctctccctcgagataccatctgttttctaaatatctttccatgtgtcaatttgcgttgtaatccatcgagttccatttccagattctactcctaggatgacagaccatcactgcataccttgagtgctatagtttccttgagtaactctccttatgtggctttcaacatgccagtgttctgtttcagtttcctgtcctagcaagtgttatctcagccttgtttatatattttttctctatataatcagatctggctttgcatatcattccttgttttacttgatgtggtctgtaatcacatttttgtttctatcttaccacctttctcaagtccctccacttcctcacgcatgttatgcatttaaaaaattatttttgactattttcttcaaagacaatctttaatacttctttacttatcttattggtttcttaccaagaattctcctgcctgggcagttttcagggtttacagatgtaataaatcaaattgaatgtttgcacaaaggatgtgcaaatgacaccaggctgcttaaatgaggaattagataagcctccaactctgtatcctgaagagtcacaggtggaagaaggaaaagcttaggggctggagcctttttacaaagtttgtgttaactcaggctttttaaacctcttactgagtgtggtggtatgttttcaaacaggtgctcctgaccgtaggtctcagaggatttaagcgtgcattgttccagcttgtttgcacgttttaccttgcatactgaatgtcattataaaccatccagggttttattttttccacggttgcccaggccatttaaatattgatctatttaattatttttttccagtagaagatgttgatttcaaaccattgcacctaagagaatggtgggttcttcattagaacttctttttattattattattattattattatactttaagttttaggggacgtgtgcacaatgtgcagctttgttacatatgtatacaacatgtgccatgttggtgtgctgcacccattaactcgtcatttagcattaggtgtatctcctaatgctatccctcccccctccccccaccccacaacagtccccggtgtgtgatgttccccttcctgtgtccatgtgttctcattgttcaattcccacctatgagtgagaacattcagttataagaggctgtgattttaaattcacatatggaggcttttataaggaataactctcctcttgtacctctcattagtcatcaatgagaattttagacggtcccagtttgttgctggagttaatagaaagtgatagtgcagggcgctttaaaattatacagagagaactcttgaagatttttgagcagagacaatgtaggatttatcaggcttgctatatggaatggattagagttaggagaggagagaggaagtcctgcaggaaggctctcagagctgtcaaggtgagatgtggtgagggtccgcattgggtgaaattatactaatgctggttgaatgtaaaaactgagacaatttcaaaaaatcttgtacctcatagaaaaaataaacaaaatgctaaatcatttggcaagggtaccagggaaggatgtctgatagttacatgatcttgaggataaataaaaggggcatctctcacattggtacttcgtcgttaatgttgtaacttcaccttctcccaatactgtgacccctcagaaggaaagccagggaaggggaaagtagactcatatgtatttcacgctatattccgtccactgctatgggaatccatcatctaagatgataggggaaaagaagtaggattctattactttaataattaccacactcagcattcttctttggttacttcacaatcagtagaaaacacttaggcagcttatgatgtctgtccctattcctggaagttaaatgacttttctcttttccaggattggtggccttcgtagactatgagttcctcaaaatgcacccttgcatactcagcacccagctctgctggagtcatagtatgcttgataagtgtaaaacataccactgttaacaaagctatgagcagctttcagctattttagttaatggactaaaaagctgcaccctttaaatggtaattctaaaagttatgtgtatctttgcgtttacctgtgacaaaaactgaaaactgactttactcccttgagtgagaaatagatattttagaagaaaagatgttcttaagaacttgtttacagatgacctaaaatcagttaacctttaaaaatcaattctgactaaaatgtaaaagaaattcaaaagaaatttaagagttgttgtaggaaaactgttaatctttccagccaggtgcaactgagcagatagatacccatcatataaatataatgctttcaaatttcctatcacttgattgaacagagcagataaactctttttaactaatactttaaataattgttttacagttaaatgaatctttatgaagatctaaactgttagaggaaaagttctacaatagtctcttctcaactgtggtggctatatgaacaaccctggggtttacaataaagaaacataagatcttagtggaataatagaattaaagggaccaaagtttgggtaaaccttgtaaacactatattcatgtgaaataaagatgctatcagtgcagttttagacatcttctaaaattggtttctaaccattctacaacaactaatgaatgagttgggttccagaaggctatattataaatctgttttgaccataataaatgaaataaatttttgaccataataaatgcatctattctctgaatgcgtatctacctaaaaagagtatcgcttggtcccttgaagttttaaaacaggtagacaccttttttgcaagtgtatgttcacctgggcacactgaaaatctcttgaggtggttaaatgcctgatgatttttctagatgttccttctagacagtcctttgcttttggaatatttggggaacttaaggagcctagaacctgtataatcatccaagaattgtaacaaaattgttcctgttttgcttttctttctttttcatattctttttcttctctccctgaatcctcttcaagaaaaacaagacttgcattatcactgctttgacttcatgcagtctttaaattctcaagtgctttgctttttcatgagttaacattatgtcagaaggcagttagcactggtgactgaatatcttgtgcactcaactactgtttcattttgctatcacttttcttcgtctataacacagggacagcatttttgaaatgttacatcaattgtctttttatttcattcataatcattactacagttccctgattcatcctatgttcatgtatatatctcacttattttcaattttgtttaaaattatttccacttttatttccttcatgattcttcatctcatctttttatcacttccaacactctgggaacgagggtaacaatctctatacaaaactaagcttaaacatggcaaccaggcagcagaatgttcacataggccaatggtaagagttaattgtgacagcctgtagccgtctcttagaggtgggcaaaattgattagctttgactgcggaacatagctttgtttccatttgtacttgctttagggttgcaagttttcaagtaattcttgaacttctgtaattgtagtgctagtttccagttgatgttccttgctggagagcaatgtcagtgaggagcatataaattaatttgctttgtggcagctaatattccattgaaatggctgtctcgcctcctttcttgtcttccaactaaatatttgattcctttatgaatttatggcttataggggaagggactattttctcagggtctcccctctttatatttttagctcctctctctttgcagacaaggggtgtgtatttttaaagcttgaatttactgtctctgatgtttctttaaatttcctaggacatcatagcagtaacttgacaatagctttaccagctttttctgttccatttcttttttattcttaacagttgcctagaagtgcatttctatttactcctattttgagtaagaagaacccatgataaggagaaattagtctttagatttaatttagggtacttctctagcccctataccttcctgatatcataaaattaggatgaccatattttccggtaatttttgaattttgatttagatgagaaatgtaagttatacatgtagtctaaatatgaaggaaaagaataaaaaagtcacaggtgttacttgttcatattgtttaaagtaaatttctaaggaacagatattttaattattcccttcggtgtttacatgttttacatttttatagcaatttcagtaaattggttaaaaaggcctgaagagttcaaggcatgggctgttcagagacagtctttcttccacaacaatattcatgctttttgaccttggtgtaagagagggatttatcattggccctttttagccattcattagtatgtttgaattttgttgtgctggctcttataaagtgaagtattttggaccacttgaggcttataaaccaagtaaacaattctgagggtgttgataataactgaagggctaacatatagcagcatgctgctaccactaagacagaatagacaaacccacaaatcatggctagtatcgttctcagagctttattcccatgacctttcaagattacattgccatatctgtcttggacgctgagcatgcatatatatgagaaaaggatagagatatagtttagtactttatttcttaagacattcagtgctggtttatgacttatattgagagtctgctggcattcatcacccaaagttgtgaagatatcaatgtctgtttacaaacagttctgtatataacagatgtgttttttattttagtcccaaagggcatagcagaaaacacatggtgaagtgagaggcccttgattcaaggcccagttccataactgtttgttctttgatcttgtacaagtttgctacacttttataattttaatttcctcatctgtaagataggaataataatactttctttttcttattgttgagaggattaaatgatgtagaataagtgaaagttatttttaatctggaaaaccatacagaatttaaaattttatttcctctccactgtcttatcaagaacccttctttctgttgcccatctttaccccacccccaaatgaagcctatacttcttacaacaaagcttaatttctttatatgacaggacagcccagaagcagaggtactaaatgtcagaatctcagttatgccatgctgatcccaaatcctacctgtctttagtttttgtgctttaataagaaataagtgtatttcactatctcagagcaagaacagtataaacagtcacctgcctggattcacacccttgcactccttctcactaactgtaagacttttgaaagttactcaagccccctgagcctcagtttcctcatatagaaagcaacagtagtgctaccttcctcacagagtttgtctggatttgtctggaaaagtagtatctgtgaagggccaaaataagtgttcagtaattggtatctatggtttttcatggtaattaatgatgtatattatatggaaatgttagatccttctttttcacaagtttctggacaaaggagatattacaaaatgtttttatgtttattaaatccattttcataaaaggaagtttttggattctcttaacagatcattgacattctccttgttgcaataaaacaaatgatacacatcacttatttccttttcccctagacacacacacacacacacacacactgactcacacacacacattctgtttctcactttgcttgtttgatcttcagcacagacggatattgtttcacgatgatagaagaggatgactctgggttgcctgtggtcacttctggttgcctaggactagaaggctcagattttcagtgtcgggtaaggtagataacttgattctgtaacctttcattggctagatttccaacaagtttcaagcaagataaaaccattctttttcttggccagcccatttttagtatagtcatgagctgcacaaaaacatttaggtcagcaacagatggtatgtatgatgacagtggatggtggtcccataatattatagcaccatattttgactgtaccttttctatggttagatacacaaatggatactattgtgccttaattgcctacagtattaagttcagtgacatgctgtatggatttttaccctaggaacaataggctttatcttttggcctatgtgtgtagtaggctataccatctaggtttgtgcaagtgtactctgtgatcttctcacaatgacagaatcacctcataacacatttctcacaacatatccctgtctttaagtgacacatgattgtaatttagaaaactgaaattttccattggaccaattcttccttcattttgaaatcaaatattatttttatttttgctgttaacgtcttgtttagtgtcgcattagagcatcttcctcaaaatccaatttagcttgttgcattaatccaagccttcttcctcagtttatacaatgcacactagttattagaaatgtagtagtaattttgttgaaatgcaaaagttgcaataagataatacatggtagcttgaaataaattaccttatagaggagaacatatttaaggtgtttgagtgaaattgttagaattttaaattagttctctaaatagtgactatttttaaagttttagatgatttgactttgaaatttggaagaaactcactaatagctgtttgggttcgattataggacactcccattcctcatcaaagaagatcaattgaatgctgcacagaaaggaacgaatgtaataaagacctacaccctacactgcctccattgaaaaacagaggtaagtgaggaaggcttccagcctggaaaatcactaggtatcatgaaaataaaaactaaaaactagaatcgttctctctcaatctacctgtaccactttccactgctggagcagagcactgaggccagatgacatggaaccatcattcgaagacatgtgcaagtagtttgtgggaaaacagtcatatgtgacttcacttttatgatttttattttttcccacttctgttcagaaaattgctattcctagagtttgtagtgtatttcagggtggaggcaggagctagcactctgcttctccctgaaagttattcagaagttgtagttcacccaaaaactaccatttgtctatatttattttaaaagtaaagaccatataaagggctaaattaaacattatttgctatatggcatttcctttttttatgctagagtaacaccttttagtcaaatcgtatcaatatattgataaaatggggaaggtatctaaaagttttaatttcaaaacttacccatttaagtgttgttcctttaaaatgacaaatattgcctcccaagatattgcctcccaagagaccttttgtttgcaacaggtctcatgttccctttctcctcctccatgctttcagcgcgcgcacacacacacacacacacacacacacacacacacacacacacggttttttgttgttgcagagttttaagtcctaaatcttatctaagtgatttaaagtgatttttcatgattgattttatttcttgagaagagaaaaatctttccaacaaaacataatggaatttcatgactttgttttgctttctctctctctctctcttttttttttttgagacagggtcttgctctgttgcccaggctggagtgcatggtgtcatcatagttcattgcaacctccacctcctgggctcaggcagtcctcccacctcagcctccccagtagctgggaaacaggtgcacaccaccacacccagctagaattttgtgacaaatgttttaacatttgttcctgttctagcctagaaagctatacaagattgattaataatgattcacatcaaagcctcaccagcatttttttttaattgtggcaggcaacatgctaggtattaggaatacagaaattaatgaagaaaattattcctcccaagaagtatacattagaatgtaagagagcaccgtgtcaataactatatttgttcagaaatatctcattagtagagttagattataaagtgtattaaggacataatagagtgagtggctggctctacctgggggaggaggttgtcagaatagcttcctagaagtgatacttgaacaagactttaaggatgaagaggagtgtgctaagtggataaggcaggataggctaagtatatagaaagtttaaaatttaaatggctaactttagccacataatctgctaaaaagtacattaattaatccattttagcctcacagcagccctgtgaagtacatagaattgttcttccaactttaaagataaggaaaacacagcaccggaaagtttattaactttgagtttgcatagcctatgagtagcagtgactctaaacagatgcagtagttaagtgcagaggtctggtttgtaatattggagagccatttgctaactacaggagtatgaaacagcatgactggttggagaaaaatcccataattaagagagatgagggctgggcacagtggctcacacctgtaatctcagcagtttggaagaccaaagtgggaagatcgcctgggcccagaagttcaagaccagcctgggcaacatagcaaggctccatctctaaaaaaaaaaaaattttaatgatctgggcatggtggtatacatctgtagttgcagctactagggaggctaaggtgggaggatcacttgagcccggaagttcgacattacattgcgctacagtcctgccactgcactgcagcctgggtggcagaatgagacactctttctaaaaaaatctttttaaataaataagaaaagagagatggggccagatttcagtccagttaggagtgtgaaggtgagagagcattatctgaggaggatgtaggaatttagaaaaatagtagaataaaactccaaaggacagagtaaaaaggcttagaaaaggagggtaggaacaatgagaagacaagttcttggtccagggcagtgtggagatgaggatgcaggagtggctggtggactctactgagcattgcgtaaggtggctggctttggtggggtttagtagcattagaatgcactgctttgagctctgaggatctcaggtggtacttaggcaaggtctttccagattccactgctttgccagtgcctaggcaaggtctctgcagagtctactcaggtagtgtctagttccaaagtctctgcagattcttacctttttgggccagctgttttggggtcaagtaaatgtcactgcagattgtagtctgagagcactgatgtttttacatagctataccacagagctgctgctttttttttttgactctaccatatacacatgtacagtttttattgaaattgtactagatattttactttctagctatatgatttttttcttctatttcttattgcaattgtgaaccatcttctagtcttataaaaacagtcctggcattttaagcagttacaagctaattatcggagaggtgatagtagtgacagaatgcagttttgttgtgaaaccactggtgattcttaacttgcctctcagagtgaaccagacttcgcccgggagttctcagttctacttcccagagcagttggagtgacagcgcaggtagaaatctgctgtcctggagagagctgaaagctgtgggctctgctcttttcctgataggtatctggaactgttcactttctgagactctggctgtggcttgaatgtttacattgttagtgctccgagcacaggtaatggcagattaaaacatgaccagcgtgaccagcagaaacaaaaggtttattgataaggatcacctattcatgagagaagacaaggaggctgccggggatagggttatggggcaaataaaaggcaaatgggaaggtaaagctagccttaaataaagtgcttgatggaaaggaaagaatcccttgatccttctggtctcattgctctcataaatcagaaatataataagataagtaatacacagtgttcttgcagctcagggtgtatcctgtatcttgcatttacatggaaagtaaaaggcagtgaagcttggagtcttagtaaaattatatcattggaatggaaaagtattatgtgttcatatactgataatatattgacattataattatgtggatagttctagttttggttgagtatctagcattctcctaaaatctaaaatttttgcaaaatctttcgttatctttaaaattggaaatgcatttaagttaagtttccagtcgcagtcttaacgtatttgtgtgttacagtgtttggatgcttctatctgtataaaaatattgtgagttgtgctttcactggttgaggtattatgataccttgaatttatttttaactctttatataacctaagagagggaggaatggaggaaaaaatttactaagacaatttattgtgttaaattttagcctgcataacattaagagcttacagattattttcaagatttactaagcagcatgtttagacaatgaatgctcaaattatatataattcctgtttgtcctgaatggctccttgaatggctcctgttgagccctgaatgactttttacaagtgctataatatgtcaagttcctgagctcccttttcctggattattggtaacatttcttaatttattcatataataactgctttagtagcctctcatttagtgttttcagatggagattactttcattaatattttgcaactattacaaatcataaatagctgttaaacatatatattttagactgatgagtaaatcataacactgaccatcatgaagtttggataagaaattcatagtggatttttgtttgtaatagataatccaaagattttctgaaatattttgaagatgtttttctttttttaaatttcagatttcatttgtacttacaaggggtacatgtggagactgttacaggagtttattggacccaggtagtaagcatagtacccaataggcagtttctcaacccatctcccctcacccccgttaatccacagtgtctgttcttgccatgtttatgtccatgtgtgctcagtgtttagttcccacttataagtgagaacatacagtatttagttttctgttccttcattaattcacttaggactatggcctccagctccatccatgttgcttcaaaggatgttattttattgtcttttatggctgcgtagtattccatggtgtatatgtaccacattttgtttatccaacacaccattgatgagcaactacgttgattgtgtgtctttgctattgtgaatagtgtggcaatgaacatacaaatgcatgtgtctttttggcatattcctttggatatgtatacagcatcactcctattcagcatagcactggaagtcctagtcagagcaatcagaccagagaaagaaataaaaggcatccttatgaaaagaagaagttaaagtatcttcactgatggtatgatcgtatacttagaaaaacctaaagactccatcaaaagactactagaactgataaacgagttcagcaaggtttaaggatacagaatgaatatacaaaaaatcagtcaatagcctgcctttccttccttccttccttccttccttccttccttccttcctttccttccttccttcttctttcttttcttttctttctttctttctctctttctctctctctctctttctctctctctctttctgtctgtctctctctttctctctctctctccctcccttcctcccttcccttccctccccctgctcccctccctcccttccttacttccttttcaagatggagtctctctcagtcacccaggctggagtgcagtgacacgatttctgctcactgcaacctccacctcccgggttcaagcaattctcccgactcagcctcctcagtagctgggattacaggcgtgtgccatcatgcccagctaatttttgtatttttgtagagacggggttttgccatgttggccaggctggtcttgaactcctgaactcaggtgatccgcccaccttggcttcccaaactgctgggattacaggcgtgagccactgtgcccagccagtcagtagcatttctatacaccaataacatccaggctgagagtcaaatcaagaacacactcccatttacaatagccacaaagaatatgaaatacataggaatacagctaaccaaggaggtaaaagacctctacaaggagaactacaaaacactgctgaaagaaatcagagacaacacaaatggaaaaacatcctatgctcatggattggaagatttatgttcagtttatgtgttcatgataatttcctagatgttttgatctgggcatgcagtgtgaaataagcgcatcacggggctgtgcattaaccctttgagcacattattgtttagtaagatagtatccttgttcttaggaagtaccctctgaagtatttataagtggatagtggcattatgtctaaaactttaaatgatccaaaaataatacagacacacaaataagtaaacaaataaaaaatttgaatgcaaatgtatgtatgcatattatacataaatattgagagagagaggcattgagaaggcaagataattatttttaaaatgatgaaatgttaacaatgagaaatctaggtgaagggcacattggaattcttttttcttattttttttctgtaagggtgaaattatttcaaaataattaaaatctttgttcacattgatggtaaaatagaaattactgttaccttttaaaaagaatatttgacaatatgtatgaaaagacttaaaatatatatcttatgaactaacacacctacttctgggaatcttattaaggaaataatcattagcatgtgcaaagatgtatgtgtaagagtgtttattacagaattgtgtataacaaagaagccttatggcagaatctttagaatctcctgaatgtatgacagaagattcactttctaattaggatgattttatgtataatacagtttagtctttaaaagtcaggttgtagctgggcacagtggttcacgcctgtaatcccagcactttgggagaccgaggatcgcttgaggccaggagtttgagaccagccgggccaacgtggcaaaaagccatctctgctaagcatacaaaaataagtggggcgtggtggctcgtacctgtgatctcaactactcagggtgctgaggcacagaatcgcttgaacccagaaggcagaggttgcagtaagctgagattgtgccactgcactccagcctcggccacagaggaagatcctgtatcaaaaaaaaaaaaaagtcatgttgcaataataaataatttcaaataggtgggaggacactgaatgttcccaacacaaagaaatgataagtgtttgagatgatggatatgctgtctgatcactgttcattatgtatgtattaaaatattataattatgtgtcaatataaaaatcctgttgcagaaaaaaatatttgttgttctggaaaatgttcacagtattataaatgagaacaacctagttataaatcagtatatattatattttgcttatgaacatttttattgaaatgatactgttagcagtaatttttcctgagtgttgaagaggtagtgattttattttattttggttagttgatccttttcagtttttcttcatgtaacatataatacttctgagtaaaaaaagttacattgagtggaagaacattcccagccaaaatatttaggtggccatatagttaaaggtatatagtacagttggaaaacgtcttgtccatagcatccaaagtcataaattacaatactaccttttaaaattaaatgacagtaatcactctctcaaaggtaaatggtgcctttaataagaatggtactaatggtattactatataagtgcacctggttttaagtcagtttcctcaaaatatgtcccagaaatcacccgtgtaaaatttacctgggatgattattaaaaataaagtactttgaatggaaatctttggggttaaagtcagtgaatatacattgtataaagttaagtcatttatataaaatttgaggaatctgatttgtcaagaactagagttaaaatgagtagtgtttaataatttgttgtataaaagtatcatacattctttggctggaacatatacattcttttaaaatatgattcagtttaagaaaaagtatggattttgaacacatttttgtttaaaacaacgcacaaccatatattctctatttggcaacatttgaggggtccacttcctttttatccactataagatgactttatatacaacgagttatgttttatgtcccatgaattatatagatgcttttttattcaaattcatggtatagagtactccagagaccacatgagaagagcctatgaacccatgagctgcgtctgtaataaagatgaactacctgtttctattgtgggtgcacagacccacttagctttgttgatgttctttctgtagttttatcctgtgtcgagcctgttccttccagacaggaagaaatgtgtgctcttgattaagtgcctaggtgaaggatgattcacgctagtcaaacttatttaattttgagtatatatgggtttttaaaaaattaattggtatgtgaaaaggatctttcacattttgtgcgtgatacttagcaagtacctttaggaaagagttactttcttatttttaagtaaaaatattctcttgattatggctctttttctttttaatttcagattttgttgatggacctatacaccacagggctttacttatatctgtgactgtctgtagtttgctcttggtccttatcatattattttgttacttccggtaagtttctaacatgtagatgcaaaatttttaatttatagtgtcttctttttactaatattctgcttttgcctgttagtgtttctcaccacagctttatttatcttaattagatcttatagttaactgaaaatgtctgttactgttgataaatatttgtcctaatgaagttacaaatagatacctatctcatttctgcttcagacttcaaaactacccatataaatattttatccctagggaaactagggtagttagagacttcagagactggttgttacttaggtttgattccaagcagagaaatggccatgttgaacttaagagttgctcaaattccttattttctaagctataacgtttctgattattaaaagattttaaacataatttatagattaatcattaaaataaggtcctttattatattaaattcggtaattcctatttttttaatggcctatgaacttatgttctagattgtgaaatattaaggaccttgatatttatgtcatttgccttttgattaatttattactcatttgagatactctgcaaatggtcagattaattgattcaaataaattcatttctaattgaaaacttaagtattgacaaaaagtttttaaagattaaatttatattatttctttagatatgaccttatataagagagttagctataatgatttttgtacacccaaaatttacatctttaattaattagggaccttagaaaagattttaaggaataatattggagctatttagaaacactagtagaatgtagtctgcttggatatgtgcaatttgaaataaataaaagaagaaaaattgtagatgcttgagactgagtaaaaatatgtagtttatttagtttattttaaaaaataggttagccaaacagtaatgagttttacttgggaaaccataactaagagtaaaaaatatgaagcatttaatgtattatatttaggtgctaaaataaaactgctgtgattaccattttagttgcaatattttactccatcattgcatttcattatctaaaattatcttcatctatccatctttaggtataaaagacaagaaaccagacctcgatacagcattgggttagaacaggatgaaacttacattcctcctggagaatccctgagagacttaattgagcagtctcagagctcaggaagtggatcaggcctccctctgctggtatgagaagaacacatcttgaatttaaaggaaatgttttctgaaagaactgtcaatgaatatggggtttcacttactgaaatagggcactggacaaggagaaagctctatgcagtctgttggacatccgatctcagctgcagggcttcctgataacattttgacatattgagagtaaggtgattgttttttaatgtaggtgtatggttacaatccagaccctcagacattctgatgaagagcagattagaaaacattaaacacgggaccatcttccctgtgttttccataaggatagcattaccgcactttggcctggcttttgaaggctaaagtattacaaccaactggcttctcagtatttctacaaagaaagagggttgcttttcagctgtggggtttatgtttcagggtaaagttctggcttttccattcaggagaagcttcattttctgatggtcagcactgccaaccttgaagagaatatatgagcaaatacaatttgaaaatcaatagtattacacttatttttttctaaaagagatgtacaaatagtaaaatcccttttggtattaatgaattagatgctcttggaatttaaactgagttcttccagtgtttcttgccttcaaactcatctttcccattactgtggagttctttctccaaaaccattgatcttgcactgttatgtcctgggtaaaatatcctaatacccaatactgcttgcaggtcttctttcccagcttggtatgtgtggcacataaactcaacctgccttcctgacgtctcctcccacctcttcccagtatgctgcctgggctctagcatcacctttgagtaattgtttctcaaatacaacatatatccacgtcattgcaaatgtaatctctttactggacatcactccaactcatggctcaaggcctacctcatgttttacctctgtgacaacttctcagttaccccagactaagccagtctatttatcttctgtgataacattttatttttagcactaataatggccatttaaaataatgttataattagtggtaatgttcttgtgtcttttggtggagtctgtcctctttggggtagaggttacattttgctcactttctatccccagtagagtggctgatttattataggcgctgttcaataatttgtttttaaaaagctttcagctcctacttttaatagctataaaaatactgtcttgtttctataatccagataccaaaaaataatatttggctcacatcatataatgattaaaagcatatattctcaagccaaattgtctgggttccaatcctggccagacattggcctttaaaactaaatcaaattctcatttagtcctcatagcaaccctataaggtagtaccagaaatatcagtataaccctgtattacacatcaggggatacaggcccagataggtcagctagctagtacgtggagaagccaggattcaaacccagatgatctgtgctcttaacattagtgagatgtgaactaaatgttggttaaataaaacaagaaagtgcatttgatggcggtaggatgggaaggagggttctataaaactcagttcaataaagaaaaagtctctattacagatttattttctggttttaagatttggttattaagataaacaatgcagaggtatacagttctctctccatatattgatatgtgagtgaatacctcatcttaacattgatttgttattaattttaataacataatgggcaaattagtgccttatatataaccacatacttggaccttgtgtttaacaaatgactttatacgtgccctttaattttgcatcttttctttttcataaaatgtcaattttttcctactttaaaaggaaataatatcgtagggctgttgtaagaattaagactgtgtgtgtgtgtgtgtgtgtgtgtgttctgtgtatgtcttctcacagtcctggaatagtgataattctttataactccttatacattcagttattctcagagtacatgaaatatagtgatctttttgaaagtacagttatagtcattgtatcttacaggcattttatttatacaatcaatctaaaaagttggtatctaagaatgtaatatagaattaaagtttaggtacagaaggaccagaaacatttgctaaatcaaataaaaactaaaataaatcagttaaaaaattttgaagttatatttttaggtccttacatgttataatagcttactttctgtctttgggataagttgttcctattctatcaagtatcgccaattctgtcaaaacttataattaaattataaaatgtattatcgttagaaaaaaaagcagatgcaaaactgcttatgttaggaaattctccatagacttacatgagcaatgctttgtaagatctgtaaattaaatatttttctttaataaatgtgggaagtttcctctcaaatgagtgatttccctgtgtatgaatttggctcccaactggtgcccatgttgctcctgtttccttgtttggaaatggagtacagtggactcaacatgatgtctcatggcgcacagggctcctaaagagaggacggctgcattacacataaacttgcttgcttatttccatcaagcttcagtggcttcatggtacatcagcagttcttttttaataaattacgaaatttataatcttcattataaataatatataatatataatgtccccccaaaatgttcatgccctaatccccaggatttttttttttttaagacaaggtcttactctgtcacttaggctggagtgttgtggtgcgatcttgtctcattacagccttgacctcccaggctcaagcgatcctcccacctcagcctcccaagtagcttgtcactacgggtgtgtgctaccacacctggctaattttcatattatttgtagagctgagtttttgccatgttgcccaggctggtcttgaactcctggactcaagggatcctccctccacagcctcccaaagtgctgggattacaggcatgagccaccgtgcccagacctaatccctagaattttatgttctatgacaaaggtgagcaaaggttgctgacgataagatgagatcattctggattatctggggtggcccaatgtaattgcatggctcttaaaagtacaaaaagaaaaactttaagtttttaattggtgtaaagtatatctctacaaagaatacgttccagtttgctgatcaggtgttataagagttatacgctagattccttatgtcctctaaattatataaattgtaatagatgcttagccctttcaatcttggaaccattgatatcagagttcttcaaatattttactgtaagtacagatgtgatgaagatcatatataaagagacatttaaatttaatgccacttaactcatattttcattctctttgtctgtactccactctttataatattgttcagagctctcttagagcttggtaaataatattatctccaacttgttactttctcttattaacttttctctctaatatgctggtttgtctacctgttttgcattttttattgtgacaattaactgtctcattacaaaaatgtaatttccattaatcttttcttgcttattttttattcaattttcatttcatttagagttacttggcattctgtatctcagaattccagtatgtaatctgaagaggttaaatctacttgggttgtttctgttgactctcatttatagtgactgtttctttgttctaaagaattcattctctataatcttctctcattctctttctttcttctctccctccatttttttttgttctcctttttcctccccattcttggatatttcctttatttccctgtgagcccaggagtgcattacagtttatttcttatgttatacccatgatcaagttgtatggtggcaagagttccttcaaagtactattatcccgccatagtcacggcatgaaaagtattctgcaaatggtttcctcaagagagagcatttgtaatgaggagccttggcatgctaccaacccatagcaaatttagtaccatttgatgctctctgcttaatgctgaagccctaggttcagttcctctggttttaaaggagtcagagtttaaactctggattccagttctggtattgttctttgcccagacggcagcttggtttatcgttccctggtctggtctcaactccttccttccctccctccttcctccctccctcccttttttcttcctccctgcatatagatttcctttatttctgtatgtgcctaacaatgcattacaattttgttttgttatatttatacatgattaggtgtatggtgacgagtctcttcagagtatgtagtagtccattataacggggaagtgcaagtattctactctgctgattactatgagcctactcaggttttttctctgagaaaataataatactaaaataaagtatttcataatttggaagcagtgttttgaacattcagaatccacactcaatctcaaatatgtttaaaagagtgtaacataaattaataaataaatacaaataagttgtctatatagagaaaaatactagctaaatatattttacatgcagtaatcgtttcttctctggagaaaaaaagattaaacaaatctgtagcgctgtgaatacactaacagtgtgttttgggatttcacaggtccaaaggactatagctaagcagattcagatggtgaaacagattggaaaaggtcgctatggggaagtttggatgggaaagtggcgtggcgaaaaggtagctgtgaaagtgttcttcaccacagaggaagccagctggttcagagagacagaaatatatcagacagtgttgatgaggcatgaaaacattttgggtgagtaaaagtctgcatagctatgttcagggtttcctagctttcctctgtctttctgttaacatctgcatgttaactcatctgtctagacccgttgcgaaatgtattgaagttttcttcttggcatgggcccaagaacatcataagtttctaatgggagacctcacaggaggaatgactaaggcacttctgtgagtaagtggtaggctggaaatggaatactctcaaatattttttcttcagaaacaggaaatgcgagtgtaaaaccagaatttcttagggtttcttaggaatttgaaggaacttatttttgtttaaatgttgagaaaagttgtaggaatcttatctgcagggtttatttatatcaatagtttatattgagaattgattttgtttcgcaagttagaaatgatctgtctggatcgttcaagtagaaggagagtaagctaatcagtggggtatattccttaattcaagaattcaagaccctgttttgcaatgtcttatgtgtaaccataataccataaagtagtttatataccatagtagtttgtaataccataaagtagtttaaacatcaactactgattaggaagggaccatattttcagatgtaaactcttaatctttctctactcctacaggtttttttctttttcttttcttttctttttttttttttttttttttttttgagataaagtctcgctctgtcacccaggctggagtgcaatggtgtgatctccgctcacggtaatctctgcttcccaggttaaagcaattctcctgcttagcttcccgagtagttgggatcacaggcacatgccaccatgcccagctaatttttgtatttttagtagagatggggtttcaccatgttgaccagagtggtcttgaactcctgacctcaagtgatccacccgccatggcctcccgatgtgcttggattacaggtgtgagccactgtgcctagccttacttgtacaattttgattgcttcttattggtattagtcatttaataccatcataggcatagtcaggaaattgaatgaaatgctaaacaaaaattatctatgacaaagaatgatgtttgagaatatgaattattcctgatactatttggaaaacactaaaccttttcatcttttttccttttaggtttcattgctgcagatatcaaagggacagggtcctggacccagttgtacctaatcacagactatcatgaaaatggttccctttatgattatctgaagtccaccaccctagacgctaaatcaatgctgaagttagcctactcttctgtcagtggcttatgtcatttacacacagaaatctttagtactcaaggcaaaccagcaattgcccatcgagatctgaaaagtaaaaacattctggtgaagaaaaatggaacttgctgtattgctgacctgggcctggctgttaaatttattaggttagtatcaaagtgaacaaatacatgttttatgactcttttctgttactttttattttgtagcgcagtgcttctaggatatttagtagaagaggaatatcattaattttgacatttgacggggagaaccaccaaacattttattagcaacacagcatatttgggtctgttctattgtttctatgctcatcagagacattgcttagagactgttcacattaggtttgcagctgtcattaagttatatagaaaagaagtagctaattcctgggaatacgtagtcagaattctgcataacatttgcaagtaggaaaaagttttggggaaaatttacagattatatatggataaagacaatttttatatggtataggaaagataacttgcatagatgttttgggagaaatgttagaaactaataaacaaaacccagctgttattcagtactgttatcctgtacctgaaacagtgaatttaacatctgtgcacataaaccagagcatgttgtaaaacagtggttttcagacccttagggctgcttgggttacatcagtagcttcttcacagtagggaggggagatgatagttgggactctattttgcttactcttactttaatcagagaggctccttccgtctcacagatgatttaattcgaataaatggtttctctgtttggaaaacaaaacaaaatgagcttgcaaaccactggtgtagagaaatcatcgtataactaccttttaaagaactcagtttaggcttagccattaataaatgttggatcatcttgtggatttttctaagtaagactctgtaatacatggagaggagcacaaagaaaaagtcatggagattattaaaagtttggaaagtaaaattcacaaaaaaagactgattgattggtattttcggccagaactgaaggctgaggtgtgatttaataacataccccaaatatatgaaggtcttcaccatgtaaaggatgggaaattgaagttcttgatctttaaaaacaaagcaagaggaaatgatttgggctatagatttaagttagaaatatgaacctcctgccaataaagattattaaatcctttctcccttctgatttttttttcctctgacctacaacccttttcaagtcttcctataaaaaaaaaaaatcccacaatgcttcttaaattaccagcctctctctccttctctcaccctgttaaatttctcccaagagttccaaaagatcatctgcttcgaaaacccagcaatttgttaatagtcttgtaatttggcttctgttccattctctttggacactgctgtattcagagacaccactgggcttggtcaccagaggccttctctattgccatcaccctatccacagtgtccaaacctttctttctcctgttttcttggtgtatctctgtactccaacttctcctttctctctctccactggctctgctctctttttacctcttacatattttccgactgctagatttcctgctgtatctgcatttccttcctagttcccagttttggctgatccattcttaatattaggtatctgacatcatctttcgttccctaacttttggtttgctcaagtgaatgaattttctttccacaatattcccatttgtactgggccagtgtgggccttctataccatttttctagattctggggtgaagcattttgagttactttctctttgtctctcctatttccagtcttctgtacatgctgccactgaatttattttcttgaagcctaattttgggcatcaaaataatttcatagtttcctgtggcttcgtattaaaatgtagttagagtcccttggtgcagtggactcttttcttttctgaccctgggctattcttctgccctatttccaccacacttcttacctttggcaagatttattctgaagacttcacacttctcataccatcaagtgtttataacatgcttttatcattacccgaacacccatatccccttctgtatctagatcacaactactgatcttcacagtttcttcctttgagacacctttttttatttttattttttagacaaagagtggctctgtcacccagactggagtgcagtggcaccatcacaactcactgcagccttgaccttcgaggcccaagcagtcctcccacctcagcctcctgagtaattggaacttcaggcatgtgccaccatgcctggctaattttttttttttttaatagatgggatctcactatgttgccaggctggcctcaaactcctggactcaagtgatcttcctgcatcagcctcccaaaacgctgggattataggcatgagccaccatgcctggcccacctgctgttttttttttcattatacttttaagttctagggtacacgtgcacaacgtgcaggtttgttacatatgtatacgtgtgccatgttggtgtgatgcacccattaacttgtcatttacattaggtgtatctcctaatgctatccctcccccctccaccccacgacaggcctggtgtgtgatgttccccaccctgtgtccaagtgttctcattgttcaattcccacatatgagtgagaacatgcgatgtttggttttctgtccttgcgatagtttgctcagaatgatggtttccagtttcatccatgtccctacaaagaatatgaactcatcctttttcatggctgcatagtattccatggtgtatatgtgccacattttcttaatccagtctatcatcgatgtacatttgggttggttcccagtctttgctattgtgaatagtgccacagtaaatgtgtgcatgtgtctttatagcagcatgatttataatcctttgggtatatactcagtaatgggatggctgggtcaaatgtatttctagttctagatccttgaggaatcaccacactgtcttccacaatggttgaactagtttacagccccacaaacagtgtaaaagtgttcctatttctccacatcctctccagcacctgttgtttcctgactttttaatgatcaccattctgactggtgtgagatggcatctcattgtggttttgatttgcatttctctgatggccagtgatgatgagcattttttcatgtgtcttttggctgcataaatgtcttcttttgagaagtgtctgttcatatccttcgcccactttttgatggggttgtttttttcttgtaaatttgtttgagttctttgtagattctggattagccctttgtcagatgagtagattgcaaagattttctcccattctgtagattgcctgttcactctgatggtagtttctttgctgtgcagaagctctttagtttaattagatcccatttgtcaattttggcttttgttgccattgcttttggtgttttagacatgaagtccttgcccatgcctgtgtcctgaatggtaatgcctgggttttcttctgtggtttttatggttttaggtctcacatttaaatctttaatccatcttgaattaatttttgtataaggtgtaaggaagagatccagtttcagctttctccatatggctagccagttttcccagccccatttattaaatagggaatccttcccccatttcttgtttttctcaggtttgtcaagggtcagatagttgtagatgtgtggtattatttctgaggcctctgttctgttccattggtctatatctctgttttggtaccagtaccatgctgttttggttactgtagccttgtagtatagtttgaagtcaggtagtgtgatgcctccagctttgttcttttggcttaggattgacttagcaatgcgggctcttttttggttccatataaactttaaagtagttttttccaattctgtgaagaaagtcattggtagcttgatggggatggcattgaatctataaattaccttgggcagtatggccattttcacgatactgattcttcctatccatgagcatggaaagttcttctattagtttgtgtcctcttttatttcattgagcagtggtttgtagttctccttgaagaggtccttcacatcccttgtaaattggattcctaggtattttattctctttgaagcaattgtgaatgggagttcactcatgatttggctctctgtttgtctgttatttgtgtataagaatgcttgtgatttttgcacattgattttgtatcctgagactttgctgaagtttcttatcagcttaaggagattttgggctgagatgatggggttttctagatatacaatcatgtcatctgcaaacagggacaatttaacttcctcttttcctaattgaataccctttatttctttctcctgctggattgctttggccagaacttccaacactatgtcgaataggagtgctgagagagggcatccctgtctagtgccagttttcaaagggagtgcttccagtgtttgcccattcagtatgatattggccatgggtttgtcataaatagctcttattattttgagatacgtcccatcaataactagttttttgagagtttttagcatggagggctgttaaattttgttgaaggccttttctgcatctattgagatgatcatgtggtttttgtctttgctaggcaataattaatagcctaccaaccaaaaaaagtccaggaccagacggactacatttattgattatgttcattgatttgtgtatgttgaaccagccttgcatcccagggatgaagcccacttgatcatggtggataagctttttgatgtgcagctggattcgttttgccagtattttattgaggatttttgcatcgatgttcatcagggatattgggtctaaaattctctttttttgttgtgtctctgccaggctttggtatcaggatgatgctggcctcataaaatgggttagggaggattccctctctttctgttgattggaatagtttcagaaggcatggtaccagctcctctttgtacctctggtagaattcaaccatgaatccatgtggtcctagactttttttcgttggtaggctattaattattgcctcaatttcagagcctgttattagtctattcagggattcagcttcttcctggtttagtcttgggagggtgtatgtgtcgaggaatttatccatttcttctattttctagtttatttgcgtagaggtgtttatagtattctctgatgttagtttgtatttctgtgggatcggtggtgatatcccctttatcatttttttattgcatctatttgattcttctctcttttcttctttattagtctttctagcagtcttatcaattttgttgatcttttcaaaacaccaactcctggattcattgattttttgaagggttttttgtgtctctacctccttcagttctgctctgatcttagttatttcttgccttctgctagcttttgaatgtgtttgctcttgcttctcttgttcttttaattgtgatgttagggtatcagttttagatctttcctgctttcttttgtgggcatttagtgctatgaatttccttctacacactgctttaaatgtgtcccagagattctggtatgtttgtgtctttgttcttattggtttcaaagaacatctttatttctgccttcatttcgttatgtacccagtagtcattcaggagcaggttcagttgccatgtagttgagcggttttgagtaagtttcttaatcctgagttctagtttgattgcactgtggtctgagagatagtttgttataatttctgttcatttacatttgctgaagagtgctttacttccaactatgtggtcaattttggaataagtgcaatgtggtgctgagaagaatgtatattctgttgatttggggtggagagttctgtagatgtctattaggtctgcttggtgcagagctgagttcaattcctggatatccttcttaactttctgtctcgttgatctgtctaatgttgacagtggggtgttaaagtctcccattattattgtgtgggagtctaagtctctttgtaggtctctaaggactcgctttatgcatctgggtgctcctgtattgggtgcatatatatttaggatagttagctcttgttgaattgatccctttaccattatgtaatggccttctttgtctcttttgatctttgttagtttaaagtctgttttatcaaaaactagtattgcaacccctgcttttttctgttttccatttgcttggtacatcttcctccatccctttattttgagcctatgtgtgtctctgcacatgagatgggtctcctgaatacagcacactgatgggtcttgactctttatccaatttgccagtccgtatcttttaattggagcattcagcccatttacatttaaggttaatattgttatgtgtgagtttgatcctgtcattatgatgttagctgcatattttgctcgttagttgatgcagtttcttcctagcatcgatggtctttacaatttggcatgtttttgcagtggctgctaccggttgttcctttctatgtttagtgcttccttcaggagctcttgtaaggcaggcctgatggtgacaaaatctctcagcatttgcttgtctgtaaagtattttatttctctttcacttatgaagcttagtttggctggatgtgaaattctgggctgaacattcttttctttaagaatgttgaatattggcccccactctcttctggcttgtggagtttctgctgagagatcagctgttagtctgatgggcttccctttgtggctaacccgacctttctctctgactgcccttaacattttttccttcatttcaattttggtgaatttcacaattctgtgtcttggagttgctcttcttgaggagtatctttgtggtgttttctgtatttcctgaatttgaatgttggcttgccttgctaggttggggaagttctcctggataatgtcctgaagagtgtcttccaacttggttccattctccccatcactttcaggtacaccaatcagacgtagatttggtcttctcacatagtcccatatttcttggagggtttgttcattactttttactcttttttctctacacttctcttctcacttcatttcattcatttgatcttccatcactgataccctttctttcacttgatcgaatcgactactgaagcttgtgcatgcatcacgtagttcttgtgccatggttttcagctccatcaagtcatttaagatcttctccatgctgtttattctagttagccattcgtctaatcttttttcaaggtttttagcttctttgcaatgagtttggccatcctcctttagctcggagaagtttgttaatgccgattgtctgaagccttcttctctcaactcgtcaaagtcattctccgtgcagctttgttccattgctggtgaggagctcccttcctttggaggagaagaggtgctcgatttttagaattttcagctttcttgctctggtttctccccatctttgtggttttatctgcctttggtctttgatgatggtgatgtacagatggggttttggtgtggatgtcctttctgtttgttagttttccttctaacagtcaggaccctcagctgcaggtctgttggagtttgctggaggtccactccagaccctgtttgcctgggtatcaccagcggaggctgcagaacagcaaatattgcagaacggcaaatgttgctgcctgatccttcatctggaagcttcgtctcagaggggcacctggctgtatgaggtgtcagtcggcccctactgggaggtgcctcccagttaggctactcaggagtcagggacccactggaggaggcagtctgtccgttctcagatctcaaactccatgctgggagaaccactactcttttcaaagctgtcagacagggatgtttaagtctgcagaagtttctgctgccttttgttcagctgtactctgcccccagaggtggagtctacagaggcaggcaggcgtccttgagctgcagtgggctccacccagtttgagcttcctggctgctttgtttacctactcaagctcagcagtggcggacgcccctccctcagcctcgctgccgccttgcagttcaatctcagactgctgtgctagcaatgagcgaggctccatgggcgtgggaccctccgagccgggcgtgggaccctcggagccatgcgcgggatataatctcctggtgtgccgtttgctaagactgttggaaaagtgcagtattagggtgggagtgttccaattttccaggtaccgtgtgtcatggcttcccttggctaggaaagggaattccctgaccccttgcgcttgccgggtgaggcgatatgccccaccctgcttcggctcacactgtgtgggctgcacccactgtccgacaggccccagtgaggtgagcccagtacctaagttggaaatgcagaaatcactcatcttctgcgtcgctcatggtgggagctatagactggagctgttcctattcggccatcttgtaacttccccacctgctgtttttagtctccgttcttatgtcttctaatgtaactctgtgcttattaccatgaaatgtcttgcctgttatgtagtcatcattgactacttatttgtcattcccaatggaaagtaagccccttgaaagtagataacatgcatttttcagatttgcgtttctagtgcctttccctggtgctcattacttaacttttaatggataaatgattccatatggaacacaggatgaaggaaaaagaacttttttcctaacaccagagatcctacacattctggacgaaatccccctttctaatcttacattctacaaactctccaatttgtatgctttcttttgcgaaactgagctgcttgaattttctccttatatattccatgcttgctgttgccttgcttttgattgcacagtccctagcttggaaagtccctgattttccatgtatcttaatccagtctcagaatcacctctaagtcacttgattcatcccccagctgagaataatgacagcatcttctgtactactctttaatttcccggtctttgtctgcttggtattataattattttgggacatgcttcatttctcctaccagtgatggtgcatcctgagagcaggatacatgccagcttaattaatatatttcccatttaacatgacatagtgagttacccattatagatattctaacattgttgtgaatcaataaatgtaggcaatagcaaagtaactgagactcatctcctttatagaccttaaaacaaaaaaggaaagtgagtatctattatattatagaaacttagttctgcttaatggaaggagaatgaactgaatgacctctcaaatttcatacaaaccctgattctaggaagtggagggactattttaagggataattcagacatttacttggcatatattaactacttcatcaagagatgaagagatgaagatgatggctcagatgttggctgtgcagactcctatggccatagcctagctgtgtgaggccatctacctttctgggcctcagcatcatcttccattacatgcaggttacatttgatcatttcagaggtgctttttccagttttattttctatgtttcaaagtttgctcttctcagtttttgagcctaatttttaaaacttgctttatgtgtttctttagtttctactcttttttttccactgttttatattgtatttgtgcacatatgcatggatatttagactttaattacaagtggagtcacagcttaccctgtgctgaattctctgacttcatatgagaacttcctgtgagacagtctctgtgtaatggtaagtgttctcttaggcttttcagtcatttctgaaaggctcccagggaagtcgagagccacagagagggagcagactgtgcctgagagatttcctgctcatataaattttaaaacgctgtattggtttcttcatgcattctcttgacagtgacgtaagtgccgatgcatttcctgctcagcagaaatttaatccaggtgatgtgctggcggacatcaccattaccttcaatctctattgggaggagaaaacaatgacacatgaaatgccttgaagaaacttacaaagcttttcactcttcactctgaagaattcagcaaccactctgagacttcagagtcagaacaaaatattttcatatgggaaaaataaatcctggcttagggctctctggtattaaattaaaataaaaaacctgcaataaagactaggctgtcacactgatgtccagtggatgattgagaaattatccaagtacaaaagagatagggtagcttagttcggagggtactgaatttcttgagtcttgctgatatgattctttttagcactgcttttggtttgcattttaaaattgatttggctaaatgacccaccaaagtcataaaactaagctcattcgtggcatagtgaacactcccagtcaaggtttctgcaaccatacccaccttatgttgaagactttttagttctaaagttctgtttctaagataccctgagatttcttgggattttatcatagcagcattgaatgttgaaagtagctgcagaaaactccccttattggtgaacatctgccaggcagagttcaattctgcaagtcagttcctcagctatctccaggatgccacaggaaacccacagggatgtgcacagccccttcttccatagactcttgagaattttttatgcttttggggaatccaaatcatcttgctgagagaggatttaacatcctgtagtatatgtaatgggtagttaatttcagacatcacttacaagccacaggcaaacccatggcctccttcacatgtcttctcatgcctccttttttttccacacactctttaaagtacagttcttatttcataagaagctttttagattttttaaggggtacaatgtttgcttctcttttctttctcctgtctattacgtttttttaccttcctacttcctctctttccctttcctctctttcttttaggcatcaacagcatccagcaggaggaccatccgcatgtgcccaaaggctcaatgaggtagagccaccttgttggagctagcaactctttccctgcgctcgcctctcattgccacagcgggctgtgcttaggactttcatgagactcttacttcagtttatggtacagtggggaaagtgccctgtgctcagtcaagtagttggggctctttttttttttttttaacataacacttttagccagaatttctgggtttaggtttataactaaaaggcttaattaacatgaaaaacatttaatatattatgaggctgaagagatactatatttttaaaaaactcccccttactccttgccaccgaaacaaaaatcttttgcctgccctcatttaatgcatgatagtcaagagcttaaggcatgcactgttccctgagtccactggggtgctcatgtttcattctccaacctgctcaggatcccagctgaaggctccactttcagcctttctgcacacacaagcagccccatgacttccctcccacagttacactaacacctgcagtgcacacacgccataccaggcagcagtgctgtgctaaggggcacgccaggggtggtacaccaggcacaggcaggaagggagtacactgtcgataataaaactgattaaaatcctacttttattgtcaccatgtgctgcaattctaaacaatgtcagtggctaaaatatgtctcctggcagagtgagtggctcccatcaccccctccttggtatgtccttccctggcaccttcagaggagaagaggaaaatcatagtttcgtgtgtcttttaattttcttgtctctctctctctcaaagtctttccctttgctccccttccctaccctcaaaaccataacctacagaactgtcactttgttagtgtcttccctggggtagaagagccacttggagtgtccatagacttatgaagccctttgattatcaatgtagacctcatactccaccatgctggcattttctatatcataccactgtcattcaagtgactttggtcagaaatatgaacttggttttctggcctctttaaataatcctagctgagagcagccctgcattttgagatccagatgaatgcagacattaacctcattcgtacctggtacagtagggaactcagcattattcactgcttgtctgggaattcaaaggagttgtgttcccctttgcattatcagccgatagctcccatatatgttgtgccttttccacattatatagttgctggttcctggcttccaaaatacgaacagctcaggtttgaagatgtttttactggagattgtgatggaagatagtacataaaatttagtccacctggacatttctcccaatttttttttttttttacccctacagggcttagtatcttatgaccctaggctagaagaacagaaccctttttctccctcactgagttcccctttacccccaggctctcattaatttcttactcagaaaattgtagacattttcattttatcctgttctatctccactgtccctaaatgtttattgattttttgagatgaggtctccctctgttgcccaggctagagtgcagtggtgtgatcttggctcactgcaacctctgcctcctgggctcaagtgatcctcctgcttcagcctcgcaagtagctggggctacaggcatgtgccaccacacccagcaaatttttgtatttttagtagagacggggttttaccatgttgcccaggctggtcttgaactcctggactcaagcaagcaatccacctgccttggcctcccaaaatgctgagattacaggcatgaaccaccacaccaggccttttttttttttaaaaaaaatactcattgaagcatgatttgaaaactaagaaagcttttttcctggagaggaatttatctgacatctctttattttattttcctcaaattgtatttccttctaattctacttaagtctgaatctctttagtactcacattaacagggacaaaagccatgttggatctagtggcagcattgattattgaagtataaaagggcaaaattgtctactcttataattctctgaaccctactcttaataatgacctctttgtgcacacatttccaaccattctccatgggaaagaagaagagagagaacatttcttctgtagtgaatgcaacacttttgtttttaatgggatattttcagttctccttcgtagcagctcattttctctgtaattttatccagtttatttatatcacttttgttcttcccgtccttatgcctataacctgtcctgtaatccttgaaatgtacattttctagttctggatcctgctgggttcttttaacttatactatacttagaaatatatatacttatatttgtgatataaacatacacaaaagtataaaaatgagacacccatgtaatatgaacagatgttagcagtttaccttgtttttctctggtttttctttttaaaagaaataaaatgttgaagatagccctgttgcagtcccattcctttttcatttcctgctatccttcccagaagtaacgagtatcctatttatgtctcctctgtatgattttataatctgacttcatatgtatgtagctactgcagtacataggattattgcgtggggttggaattattgtctctgagtctacagcccttgtgcagtatctatcttttcttgtcaaccttgtttctcccctccatagccctctgtggacaaggaggctagaggaagctagtgcagaaggcaccctgcccttttctgcctccttctttctcctggaactttccgtctgttgtactgtctgttctcacgtgtaccacaccatctgactctacttccattccctttttcttcctttattcttggcaccccagtgttaaatcacatttatgtctatttttggctttaggattaacacaagcttgatttttctctgccattatttgggaacaggtaaaatgatgctactgaaaatctgagaaagaaatgtagtctaatgactttcaattatagaaacatgcctgagggaagaaggggcagagctaaatgttttggaggatctgacactttacagtatcagatatggattacctataattctcatgtttgttgtttaagtgtagtgctaaaggcacttgccaataggttgatagtgatctttcacaaaattagtttgctcaacaaaattctatttatccttctagaaattggtaagatctcattttatggcccatgcagtccagagatttttacatttccctttaaattatccatagcaaagtttagtgtaaacaaaccttttccttctttcatttaaagtacattattttcctgtcatgtgcaagacacactgcgaatggagaaggattggggctatgctctttggggatataccaaatgactatgacaagtatttgggggctcagaggagttgatagtcttcagttggaaaacagattacttactcaaatgttactagggagaagatttattcagctactactagggcaaacgtctagggtgggagaggaaggggaggagagagatggcttattgctgaacatgcatatgtatttaagggactatgtaaaggactgatttttggcatttggtggacattcagaatccttgagtgtatgtttttgcagtgtttgagaaaaagaatttagagatgaactatgtatactccagctgtcacaaattttaattctattattaggtcacaattacctttcatttttctaatagatatctctacatcacacattccattatcttttcctgacctcccaaatccaaataaacattaaggagctaagagtaagaatggaatgaaattgcctaaaatctttatcaactgtggtcagattacacctttggcctttctaaatgcccttctgtgtggattgtcttaagattcttcttgttctggaatacagtggaggtctttaaccatcttcttttcatctgcaaaccctcatgtttgttttctctgcatgggacccaggacttcttacctggggtcaccactatcttcctcatgattaaaaattaaaattaggacatgctggcaccacattagtgaaatccctactctgctcccatgagaggtgtcagcaggtggagtaggaggagagcgtgctttataaatggaaatggagcttttgtagcatctattcaatctgacatgtttccagtttaccattaagtctcttctcagcatactttcctcccctgtcatttatcatttacacatacaaatgacaattttctattataccaataagtgctgagaattaacattttagcctctttttccagttttagaaaagatcccagaacactgggacctatgtttgcatatggtaaagaataccatctgttttgttttttaattacactttaactttttttttaacgtcttaacttttatttaagaaaacaggctagttattattgcacctagaaaaccacgaggggcctaatgagtacactgatgacatatctgttgatatgtcatcttatctaaaacataaaattttagattaagaattctagccggaagtgactttaaaatgttctaaaatgaagttttgcattttatgttttagtaaatgtaaaaattttgagatattcagaatgacacttaaaatgttctcaaatgacaaaaaatgacaccatgtatttcatgttgtagaagtggtcaaggcaatgagatcaaacccagaggtttttgatttttgtttttttcctgaagccactagtgttttggtattgactatctatgacagcaggataagtgtgatattcgataaatgaatctgttttccaggctgaggagaaataacatgtaaattcttgaaagtcaatagagtgtaatgaaaagcaaaagcaaaaaaaaaaattgttgggaatcaggaggtagaaaggtttattcaagattttccacagagttcagcttaataatgagtttctgtacctttttggttttatagtataccttatttggttatagtctgttcatctgtcatatctagggtttgttacttttctacctagttcctttactttctgatgagttacagtacttaagtatctaatatgtgcctagtaccatgttggcagggcttgtacatgtcatctcatttaatcatcagcctagtcattcagcacccttagaacaggggctggaactgtggctccagctcatcgcactgaagcaatggttcccaagtgccagtgtgcaggttgttgtccctccgtcattactcttttcccagtctatgggaaggaatagtaaatgggcctgttgtaaaattttcagaaagttaaagatgttatattccattattgttttcttcctttgaaaaaaaaagttaaatgctatttggttcataaaacaatagtgatagcagaaagcttttttatatgtcccaccttgtcagagtaaaacaattgcatgtctttgttggttctctccttctccccttttgaaacctgtttatagatctaagagctttacaacagctggcttaaaaaatactgtttcacatgaaattgtcatgtgtgcatgcccattttaagagtaaagtttttaaaataggaggggaaggaagagggtttttttagatatttaatatatatttagcagttgtttagggtataaatttgatctattggtaatgcaattttaaatgctgcagcttcattctgactgagttttatcttcattgttttttttttctaactttttttaagagatggcatctcactatgttgcccagtcaggccttgaacctctaggctcaagctatccttccacctcagcctccagaatagctgggcctacaggcatgcaccacagtatcagcttgcctttcattggcttttaacctgtaaatatttaatatagcttttggcaagaaatattctttaagaaattgtttttattccctggaaagtttttcttttccacttttcactaactaaagccattgtttcagaatcaccttgattcgtttttgttggtcctcttcaatgctgtaatgctttgctttactttttccttagtgatacaaatgaagttgacataccacctaacactcgagttggcaccaaacgctatatgcctccagaagtgttggacgagagcttgaacagaaatcacttccagtcttacatcatggctgacatgtatagttttggcctcatcctttgggaggttgctaggagatgtgtatcaggaggtaagaaacagtgctgtctttgaaaagctactattggagctactataaatcctttctttctgatcagaaatcaaagttatcatactgtctataagatctggttttattttcccctttatttctgttgatgcagtcatagtgcttccaggaaattatattcgacatcctagaataatctttgactgcttccttcctccagctgccactagacacactgtcagcctaccctgctttttcaagcatcactgttttctgctctgtgtattgtcttatttctgtcttgggttcttcctccagcagttgctcgatgaaatcaaacccccttttctgtccctgccagtttattctcacctagctgctgggccccatccccaactccattccctgggatttcctctgcagagatgacagtaggccataaatgtggggtcggacacccatttcttacctgctgtattttttataaaacttccccataaagcaatttgaaaacatcagttttttatcaaaaggaaattaaagtatcagagtattatttttttatattgttttttctacacatatgaggattccctagtaaaaacaattataatgaacaagaagacatatttaaatattcagaagtattattacttgtactattttgattgctctacagtctgtcttcgagtaaattctgacaccttttaggcaaggagctgaatctttggcttttctgtatcaactcttctgtatgttattccatggttgtgctcattaaaaaaccttgatgctgctgctgttcctcataatggccaatttaagtctatcttcatgaaaacatgagcttgctgaagattctgaaagtgcagcatgcacttaactagtactgagatgtgttcttgttcctgctatttatctgtgatgccttggacaggttataaacttttctttgtttcagagtcctcttaaagatgaattgaattattgtatctgcttctgtggttgtatggtttcaatgtaaagataatgagaactgcctggcacataaatagcactcaatacatgttagctattattactattaatacttttcattttggttggtagagccataacatctttaggttcatatttaaatacaaagaagaaacagttaatcaacctgcattcacacttcaatagaaagatcattatcagtggcacagtgccttctaataatcactttgggaattctgaacctgttttaagaaatttgaaatagaacacatactctctgaagtgagggaactattttgtgcaaaaggaaagttaatgcaggaaattttctctaaccagatattgaataaatttctcattctaagtgtaaagaagaagtaaccaaaaaatttaacaaattgtctatgccttgatttcacgcattataaagagtagataagcctcacgtttgcattcccagcattttgggagtccaagcggggaggatcagttgaagccaggagttgaggactagtctgggcaatagattgggacccagtctgtatttaaaaagaaaaaaaaaaaaaaaacaagtagacgagccttttaaaaaataatatgcttatacttaattaagatagctttatggaagttgaaggtgtagagaacaaggttatttttctaattatgttttcttgaacatctaaaacaaacagggctacaggaagcctatatttgaaagcctgtgggccaaatacaggagaaattattctcagcttaaaaacaaagtagctttatataaacagcagggtattaattgctgtgctagggtattaatttgctttgctagggctgtctttggatgtggagatttgctataatgttgccttattgttagaggtgttggagtccctgctctgtcccataccaactgaatggacttgggcaagttacttaacccctgagagccaagtttcctcatctgagtagtgtggagaataatgtcatctcagaaacgcatttgtgagaatttaataagataatttatatagcatacctgtttccacaactgggatagaggaagctctcaataagcgattttatttttccagagaggcaaagcacacaaaattctattttctaacactttatgaagatattagaagttttttgggcttatctttctagtccaggcccttctgggtgaaagagacacatccagatgtaggcctttccatcttttaaaggagaagaaagacagaaaggtttgaggtttcaaacagagttaaatggcagctaacaggaaattttgaaaacttgattacatgacatggagaaaagaataaggcctattattcaacagttagatttgagtaattcataattttaagtggtgagctctgccttcgtctgttgtagtagatacacctaccccaccccatccatcagtccatccaccagcggaaaataggagatgggttaaagagatgtgggctttgccttcaggctgtttccagggccatggtcctgagaatgagaaagggagaaagaactgaaatgaagcagagcacatcctgcgtgttaggccctgtgcttttcttatctcatatggaggtaaaacacagtgaaaggaaatattaacatagataatacatataattagctctgtggtcacagcagggcacaggacaaatggtgagttggaatggtctgaaaaaacttctgaaccttctggtccttgatgattttataacagatttgagtttacaagaaagaacataacacagaccccagattttggcagagtaagcccccagtgaatttaacgatgtgatatataatctgccaacttgacggcatcatctttttcagatgaaaagcaatgatatttctataaaagatgatttaggatagggaggaggggtgctcccaaaagattgttcagagcagcagcctctaatgtaattattataaggagttaatcttaagaaggtgaaaaagaagatactagaagcctgcatttttaaaggagaagaggaagaaggtagaaattaaatactaggaacaataaaatgaaagtttagtgtgcatttttatgaagatgctatagatttatatttcttttcttttaacaatacatattttttctaatagtaatgtattccttactgaaaatttggataaatataggaaaaaaatcagataatccttgaacctaaaaaattcatggttaatatttttgggtgtctgtaattttctaaatttttaatgtgcaaaaccacattcctacaattaagcagaaaaaatgtaaatctgacattttgttcaagtaggatacacttctgaatttattatgatattcatagtttcatactatagtaatagaaacagtcacatgtagtatgagttcaggatatgtcttgcagatttgcattgagatttaatatagatttgtcttttaatttgttcttcataaaaatggaaataaatttaagatgcttgttttacttagcttttggaaattaggaaagaaaggcttgaagacctatgacaatatttttcattgggctttgtattcattttttctaaattagattaagtaccatttgggtaaatatttttcaagatttattttgctatttttctgcctgaacttgtctgtaatactgatagcacttttcctttgagaactgtgttagacttttatttctacttcacagaaaataataataataataataatagtaacaacatatttttaggtatagtggaagaataccagcttccttatcatgacctagtgcccagtgacccctcttatgaggacatgagggagattgtgtgcatcaagaagttacgcccctcattcccaaaccggtggagcagtgatgaggtaaggcttgaggtaaccatgtggctgtgacagacttctaaatagacttttcttttttagctaaaattccacatattgattgtaggaattcttctttttttgatggtgatggtgatggcgcctcattgcagtaatttatatgaagataagtgtagtatgttaaattacttgttctacttttccaattttattttgccacttccagaatatattgagtgagttggtcagtgtttagcctgcataacaaataacattattttctttatttataatgtcttgacatttgcataaaacctattatttctctgtgtgtgtttttaaagcatcataatttttctctgtgacaaacccatgtacagcattctcccattttgattagagaaaaaaagtaggcatgttaaagtgatacaggttgacctagttaagatgcctgactgtgctgggtgtctttgttaataaggatgacgagatgtgatttgaacaaatccaccttcagcttggctctaaggctgtagtggtgaaacctacataggtctggaaagcagcggctagtaaggaagaaatgagtcttgcctttcctgactcctcctcctgttccacattcctctccttccaccctcgcagccttcaaactcaccatgttctagagttctctggcagactggaatgttcaagatgagtttgaagcaccactggaaaaaaaaacaggctcttatcaaacgtaccaaagcactgcaaaggggggacagagcactatttctgaagtgtaaaagccatttaaatataatctctgggccgggcactgtggctcacatctgtaatcccggcactttggcaggccgaggcgggtggatcacttgagtccagaagttcgagaccagcctggccaatatagtgaaaacccatctctattaaaaaatacaaacaatagcctagtgtgttggtgcacacctgtattcccacctactcgggagattgatgcacgagaattgcttgaacccggaaggcggaggttgcaatgagccaggatcatgacactgcactcgacagaccgagaccctgtcttaaaacaaataaacaaacaacaacaaaaacaaaaacacctttggctcattggttttgtgtctggttactaaaatgctaaataatatatacgttttccagcaagctgtgcagaaagctttatgagatgctggagctctgttattgtgggcttttggtgttacttgatatctcttcactgaggatttcttatgaagtgaaattgtacttttcaataggaagaccaataattgatgtaccacaggagaaagttttagtgatgctgtgcacaggtcattaatcttgttaaatggtgcagtgtgatgctattactgcagcagacagctatgatttaggaataactgtgtttgtttgcatagtatggaattagataaaagattaaaacttatcaagtgttataaacaatctgggagtattgagtggaatacagactccctgggtatttttatgtttgcttaacactaatttcaaagacacctttctacaatcagcagaaccacctgcttgtttctatcacaaagaagacatgaacatctgttttagtcatatataattttgcatgaaaaaagcttacagaattttacttctacatggttttaagggtaccttttaaaaatatattcaaacttaatgaacctaaaactaaaaagctacattgtaacaggtgccagccttgcagatgatacatttttctaacatttctcttcctcagtgtctaaggcagatgggaaaactcatgacagaatgctgggctcacaatcctgcatcaaggctgacagccctgcgggttaagaaaacacttgccaaaatgtcagagtcccaggacattaaactctgataggagaggaaaagtaagcatctctgcagaaagccaacaggtactcttctgtttgtgggcagagcaaaagacatcaaataagcatccacagtacaagccttgaacatcgtcctgcttcccagtgggttcagacctcacctctcagggagcgacctgggcaaagacagagaagctcccagaaggagagattgatccatgtctgtttgtaggacggagaaaccgcttgggtaacttgttcaagatatgatgcatgttgctttctaagaaagccctgtattttgtgattgcctttttttttttttaagatgctttcattttgccaaaataaaacagataatgtggatggtttaagggttatagtattatagtttaaataataacaacaaaattcttcccaggaactctgctggaaggtaaattaaaatacttgtttttccattggtaaaatattgttgcactctgtgaaccaaaagacagtctaagttggaggacatagaacggaactcatcttaaacatactccccaccccgtcttggcctcctcagaccactttggccatccctgcatttggggccgctatggtaatgtgaatgcactgggtacaaacaccgcctgtctaggaccacatttggaattcctgcaggtggccttttgcagcttcaggcaatatggaacaaatgaaggtttatgtgactctaatagaagtaattgttgataggtgttcttcagatccacttctgtttctgattgagttaggcatctctttcatggtaaaacccttttcattaaacacaaagaaagcttttttttttttttttttttttttttttttttaatgtgcagaggattgacctgtgcatgcttttgatctctcattcaaaggatcaatattaaataaaattgtcatgagctgtgttgaagacagggtgctttcaaatagaggtaatttgctcttgtgttgtaagaggaacatgtcaacaaagataggaaatgagggtgatcgtgcagatggcttgtatcttatatatgcaaaggagccaatctcagaagcacaaagaaaaaagtgtgcataccttattttgtacagataaagatgatgtctttttgttattgtctgtctgttttgtatgtgtctgagataagggatagagaggaaacatccgtcaggctaatttaactacattttattttaaaaatagagaaacataacctctagatgggacagcagaggacagttagtagaggccacaaactgttatgggctgctgtgttttgttctaaaatcaatatggttggagcatgtatatcttaggtgatcatttcacatcttaggaatgcctactcattttattttattctagtgatgctcaattcactatttaatttattatattttctcttctgtggcacttatacaaaatatctcttcacctacttagttctacagggttttaactttggagcaacatgaataaaatcatcgagaaggccaatattgtttagcaacatgaatacaatacagtttaaagttgtacacatcctgctcaactttattcatatacatttcctttctgtggttttcttttgcttcttagaaattctgttagtggttagtaaagaatttgaaagtactttctccttgctgtttttttttttttttaagacattcctcccagaatactccagggggcagtgttttataacacattttccccactgggtgattgaaggatggaggatttttgaaaatttgacagctacatgaaacatgagaaaacattttcctcacttctgaagtcggtttgcagctggtaacttgttcatccagaaaacattctaaagcaatgagactttgtgagctgtgcttacagtttgggagaatcatgaagattctttctatattttgcatttacttcccagtgcttcatagctgcattttgtttgtaactaagacagaagaatttcgtaatccttgaaattgaaaaaaaaaaaattgtgtttttaaagagtgaaaacagttagaaaacaagtagaactgtaatcagaacgctgcttcaattgatattaaaaataacctcaataataatgtaaaggttcctttctcttgtgtcagttatattcttagggatagcctagaaggaatatatggttagaactaagtgtgactaatcatctgagccttgaagagaaacttcagtgcctctaaacagatcatctacaaaacaacaggtaaacatttatgccagttaagtgggtcatgtttttgtttcttgggtttttcctaaatttaagtgaggttgggcttaccttgtagataaaattatgttttctttttggtaaatacttgaacgtggataacgtcaaatcagaatattttgtgaggaggtgatgatttgaaattaagctagatttctagggaggtgttggttccaatgaaggatgggaagaaattaaaatagtcttcaaacttcttccttattatatttggttgctttggaaaagattggtcctatcctcaatctaatttattcactattaatattttaaaaacattcctgagatacttaaaaagacccacttagcgattatagttgctcaatgaaacaagaatttatttatgcatagatttttctctgtatcttaccaaaatccactttacttagataacactaaattgttcttaaagactactcatttcccaataatcctttatgatttcaaaatttctagtggctcagaagtgaattttattttatttgtctttcacttgaataaatgagaacccagaaattaataatgttgtttattgcttactgtcaggactatttcaaagactaagaagagtttcttctaacccctccctctcaaaggaatcctaaattattagttgttagataagttttgtatgctaagatattcaggtttatagtttatgtatgtgtgtatatatataaatatatatgtatatataaatattatgttcagtttggagtctggcacaactccattatgtggattagagagtaagatattatggatgataaagtactaaatgaaacataatatttatttataaaagtgtgtagattgttaaatcacaaaaagagtgctatgaccattatgtatgaggaaacaggcctttgacctcctggaaagcactgctcaaaagtcattagtgcccatttttgaattccccaaacagaaagcttcttagaaaacatgctgagattttatttacagggaattctttgacacatttcaattggtgtgtagtcaagtatagcaagtacttaataatgactgaatttcatgttcctacagtcatacatattcattagaagttttatgttgttggtctgatctgattcttctttgtttgtgggtggaacggcactgagagaagtatagttttttaaacttgaacatgttcagtagttacattgccttagaaaacccagacacatagcagtggaaatgaaagaaatggcatcagaagtgacttaatttagcaattgtgattcctcttgtaaaacaaaacaaaaaaacaatgccatattttttggagaaaagttggcaatataggggtttcgttgtctgtttcacaagaagactcatttgttcttttgggggaaccagtgccttacagattttgtatatactgtaattattcaggactagggaacaaacaattgtattgtatttgttacagattgtatatggctttgttttaacattcccctaaataaaatggcttcattctccccttggaaaaaaacatgactgttatgttatagttgtgcttatttatttatttatttatttatttatttattatctttgaaaatatcccattgtagcaggtgggaaggcaccatgaaggaggcagatgcaggtaagtttttcacatttcatggcaggaggacaagagaaatggtctgatggcttctactttctttgtgaaggaaacacagtcatctactgagagtgaggggaaaggcagggaagtcagtggtttaagagaagtgaagaaggtttaaaattgcactggaaaattacagcttgatggggaaagagccagatggttacgggcaactctgagggccaggttaggcttcctgaagctgactgtggcacagtggccaagcgtagacttgggactgccaggtggcctgttggtgtgaatccagcttccctcactccctcagttgtgtgactgggcacattttgacctctttatcatgcaaatgcagcaacaggtcatggaaagtaagaattattactatcaaggggctgatgggccagaggagggaaggaattaattagaggagctaacagaccaacaaacaaacaaacaaacgaacaaaaaacccaggtc

SEQ ID NO: 3 - DNA, 192016 bp, Homo sapiens
ctttgtgtctggtctgctcggagccactggaagtgcctcccggagggacgcagggtgtctcgccgcctccctgcccacccccttccccggctaccttcatccgccctcccgccgccccccgccctcggtccgcgacgcccgagttccgtcaggagcccagagctgcgggagaacgaggcggcggcggcggcggcggcggcggcggcggcggcagcagcagcggcttcctcggggggttgtgattcgctcacaggagccattgacgggagaagaggaggctttcttggtggaatttacctcaggcaagatcgagccgcaggaataaaaagcgaggaagggaagggagcgccgccgggaggactagaaggggcagcctctcacacccactccgcctgccgtctcggggagcccggaccggggccgcgaccgcgacccctcccctcccccgctcctacctctcctcagccttcgccagggcctccccaaccctctcacggttgttctgcgaaggcgtggggactgtgagcttgtccatggaggcaggcaccttttttgatccagtcaaggaagaggatttgttgttttcgaaatcagagtgaaggaagcaccgaagcgaaacttaaggaatcctgccttcccggagccgcgggcgatgcgactagggctgccgggcgccgccgccgcccgtccggcttcgtccttcccggcagtcgggaactagttctgaccctcgccccccgaccccggatcgaatccccgccctccgcaccctggatatgttttctcccagacctggatatttttttgatatcgtgaaactacgagggaaataatttgggggatttcttcttggctccctgctttccccacagacatgccttccgtttggagggccgcggcaccccgtccgaggcgaaggaacccccccagccgcgagggagagaaatgaagggaatttctgcagcggcatgaaagctctgcagctaggtcctctcatcagccatttgtcctttcaaactgtattgtgatacgggcaggatcagtccacgggagagaagacgagcctcccggctgtttctccgccggtctacttcccatatttcttttctttgccctcctgattcttggctggcccagggatgacttcctcgctgcagcggccctggcgggtgccctggctaccatggaccatcctgctggtcagcactgcggctggtgagtagctccggccggcacgtcccggccactgcccctgcgggtggcgagggagggagcccgcagaggccgaggcctgtgcttgcccttcgccatgcgtccccccgatcgcggtgcagcggagctgcgacccggtgcctgcgcgcctgccccatgccttccagggaaatcgcctttaatattcttgtgtattttcctatccccacttccatattcccaccccacccccctttacggggtgaaaaagacatattgggtgtggtatcttgacatttttagctgtgaggtaatgcaacgattaaaaataatattttaatcaccagtgaacagtgcttattatgagatctctggaaacagacctgtagatttttaaaattattattataaagaagcggttttggcttatagtaaaaagaacatcaactagagaacacacacttgaaccttattttgaaatttagatcactctgggaatccatgttcctttcattattcagaaatgttaccgaatgaatagaataaatgttgaggaagccagaactgtgagattcttgatatattgtattatacggtttgataactttactgttagtcatctggcatctatctattggctttgctgtcgagacaactttgacctgacattagacttctaggagatttgactccgaaagttctttgacatttcactaaagtctaaagggtggtagtcatcctttcctttggatattttcatttcagttctcagaaaccttaggaaaaagaccttatcttctatttgcaactattttttcaagcagccttttggtgatttgcttttagaaattttcaggagtgaattctacatataactcgtacacttggtttatgatgggcaaatggattgtgcttttaaaacgagtaaaggaccaaatgaccctttcgaattactttttttcttttgataagtgtgtttcacattaaacaaatttctcattgctatgttagatacagaggttacttgcttattttcattttgaaagtctgatctaggaaaatgccgaagaaaatttgaagtttccttttatgcttttgctattgttgaataatgtctactgttgattaatgtctgttaaattgatgataaatctatatggttctgttaaaataatttgaacttctgagtttactttaaaactgatattttaatatttttaataattgtagttgctttcagagtaaaaatgatttttctctaaatttctttatattgtgttagctatttaaattctctagccataagccatgtggttcctgtaaaatatggagtaaaaggccttaaacgttccatgagcagaaatctcagaacataggcttttcaatgttatttgttattcttaacctttttagaatatagattctcatttatgatgacgtgctcataatattgtgatcagaactgataaaagtaagagaaaaagcatttatttaaaaataaacttaatttttgtttggtaatacaatcatcttagaatagtgtctcttaaaagggagagagtaaaagaatcactgcttaaaagtggttgtagtcttttttttctttggtattgcatagcaccagatgacaaaatttgtgaagctggatttcagacctgtaacagtaatgataatagctagtatttattaagtgcctgccatgcaccatcagctattcaaataactttacatatattttttcatttcgtcttcatgacaattctatgttgtaggttattatcattccccttttccatagagggagagtaaagtacagagaatttgaataactcaccacacagtcagtaaattatggagccaggattatagtgtgcgccctcacataccacattaatggtaacagcagcactagcagcaacaacttctcatcttattggatatatgagatggagtaattagccttcaccagatcaacctttgtaaagaagcagggacacttacaaggtgttagtgcagcagtggttatgcaaatgtcgtagttctgaacatgtaaaactttgcttggcctaatattgaagtggctagtgcagcttcattaagtgcaagctgattagagagggcctgtgtggatttgggttacacagatgcagtgatgttaactcgacaggcgcaaatggtgcagctgaacaggaaaataaatcctagaagactgattgatagcacatcctttttcggggtcatggataaatcatttcttttgattccctctttctcacttattgagttcttggactccttaattcttagaacattttctttctttctttctttctttctttcttttttgttcagacagagtatcactctgtcgcccaggctggagtgcagtggcacgaccctggctcaccacaacttccgcctcccaggcgcaagtggttctcctgcctcagcctccagactagctgagattacgggagcccaccaccatgcccagctaatttatttttattttttgtatttttagtggagacggggtttcaccattttggcagggtggtttcgaactcctgacctcgtgatccacctgcctcggcctcccaaagtgctgggattacaggcatgagccaccacaccccgcctaattcttagaacattttctatgccccccccaaaaaaaaaaacaacttatgaaaaataagatgtgctggcttggtttatgaatgaattcttaataaaagaatacaacacagctattatttaaaggtcaacttctgtaatgcgttttaaataattcacttgattagattgcaattttacatacatctcttgaggaacacacacattatataaagtaagattaatctaatgttagtgaatattactgagtaactgaagtttagtaatcttcattttagtttttctcaaagtgtgggtactgcaacagaattacctggggttcttgataaaaatgcatatttttggccctatagtccagatgtactgaatgaatctctctgggagaacccccgcaaagtctcactcaagcaggtgcttgagaagcactgctttatatcatcagtcctgattgtttggatttctttctttttttttttttttttgagttttgctcttgttgcccaggctggagtgcaatggtgtgatctcggctcactgcaacctccacctcccgggttcaagcaattctgcctcagcctctcgggtagctgggattacaggcatgtgccaccactcctggctaattttgtattgttagtagagacagggtttctccatgttggtcaggctggtcttgaactcctgatctcaggtgatctgcccgcctcggcctcccaaaatgctgggattataggtgtgggccactgtgcctggccctggccctggccctggccctggccctggccctggatttctttctttctttttttttttttttttttttttttttgagacagagtctggctcggtcacccagactggagtgcagtggcgccatctcagctcactgcaacctctgcctcccgggttcaagtgattcttctgcctcagcctcccaagtagctgggactacaggtgtgcaccaccacacccggctaatttttgtatttttagtagagacgtggttttaccatattggccaggctgatctcaaactcctgacctcgtgatctgcctgcctctgcctccgaaagtgctgggattataggcatgagccaccacgcctgggctggatttcttaaatatggtgattcagtgacattttgctgtgtaattattggcaaccacaaaatcttagtggcatgcaacaataggcatttattctgctccatgtgtctctttctggggtccaggctagagggagaagtaacatctatctgggggaggcttgtgtcatggcattggcagaagtgcaagaggccaagcccaaccctaccagcacatttccagactctgctctcctaacatcccattggctgaccgagtcatatggctaggctaagctcagaaacaagaggtatcaaagtacactttgcctgtgatgaggctaatgtaatatttggatatatagtactattgcagaagaacgaagaattgaaattctcagtagaccacatataaccagtaagatggtccagaagggaggcttttcttaccctttgaagagggccaacctcttaattagttttttgcattaaaatgatataaactttggtctctacaaaagctattctggcatgtgggatgatgtgatagtagtggtattgatgtggatgagtagtgaggtgagagataactgttcacacaagacaaaacctttccttcattaaaggccagttttttttttaacaaaaagagaagaaattgaatattgatctctaatgggtaaattctaaccattaaaaaaatactgagtggaatctgtgtgaatcagttaattttataattggccacaccacttattttggcacctactcatagattgctgtgctgctggatatcagtttttgtttttgtttttttttttttttttttgagatggagtcttgctctgtcacacagcctggagtggagtggcacgatctcgactcattacaacctccacctcccaggttcaagccattctcctgcctcagcctcccgagtagctgggattataggtgtgcaccatcatgcctggttaatttttgtatttttagtagagatggggtttcactatgctagccaggccggtctcgaactcctgatcttgtgatccacctgccctggcctcccaaagtgctgggattacaggtgtgagccaccacacccgaaatttttttatttttagtagagatggggtttcaccatgttggccaggctggtctcaaactccttacctcagctgatccacccaccttggcctcccaaagtgttgggattacaggtgtgagctaccgcacctgaccaggtatcagttttatgtatttgccttgtccttcctactgataattgcttccagaggacagtattcatgtctgattagttttataatttagtagacatttaagaaatacttagtgaatgaataataaataggaatttcaaccaggaatattctagggttgtttattgactcaaataacacaccaataactttttctttgtcctagttccttcaactataaagtatgtagtttaagaggtatagtgggaagaccactgttgggagttaatgagacctagattctatatgattccgggcaaataggttacttaacatagttttcttacttgtaataatatggggttgtacttgatcattttgaaatacagattcatgggtaccccactagacctactgaatccaaatctctggacaacgagcctgggaatctgcctttgatgccctcatcagccagtaaattttaggtacctttgagaactactggatctaagattctttctaactctcaagttctataactttatttctactttttgtggtaattactacttaatctatatcttttattgcttaatctggtaaacattaggaacaaacatttcttaatttgtgcattaagcaattacccaaaatcttttccttttaaaaatttgcagtgtggcctgggcgaagtggcttactctgtaatcctggcacttggggaggccaaggcaggcggatcacttgaggtcaggatttcgagaccagccctgctgtacaaaaaatacaaaaatttggctgggagctgtggctcacacctataatcccagcactttgggaagccaaggcgggctgataacctgaggtcaggagtttgagaccagcctgactaacgtggtgaaaccccgtctctactaaaatacaaaattaggccagttgccatggctcacgcttgtaatcccagcactttgggaggccaaggtgggctgatcacctgaagtcaggagttcgagaccaacccggccaacgtggtgaaaccctgtctctactaaaaatacaaaattagccgggtgtggtggcacatgcctgtaatcccagctactcgggaggctgaggcatcgcttgaacctgggaagcggaggttgtggtgagccgaggttgtgcctttgcactccagcctgggcaacaagagcgaaactctgtcaaaaaaaaaaaaaaaagaaaaaaacaaaattagccacgcgtggtggtgcatgcctgtaatcctagctactcaggaagctgaggtaggagaatcacttgaacctgggaggcggaggttgcagtgagccgagatcgtaccactgcactccagcctgggtgacagggcgagactccatctcaaaaaaaaaaaaattactattttcaaaagcactaatattggctgggcctggtggctcatacctgtaatcctagcactttgggaggccgaggctggtggatcaactgacgttaggagtttgagaccagcctggccaacatggtgaaaccccatctctactaaaaatacaaaaattacccgggcgtggtggcgggcgcctataatcccagctacttgggaggctgaggcaggagaatcacttgaacccagtaggcagaggttgcagtgagccaagattgtgccactttactccagccttggcaaaagagtgaaactccatctcaaaaaacaaaacaaaacaaaaaaacactgatatgaaagattatatgcatgcctagaatcacaatgcccaacactgtaccttaaccctgccttgtgcatcagtaacgtttaaaatacattacccaaattatcaagatatagtgcaaaatgtgtgcaatcattcacgtcttaaatgtgtcgacggtggacttggtggaaaaattatgagacatgataaagtattgtgccagaggcattggcctaagaattttagatggagttaggtatttgggacagttaggtatttgatccacatctctttctggaaggttagatgcaaatggaggttgagaaatttcagtttctttctttctttctttctctttctttctttctttctttctttctttctttctttctttttctttcttttctttcttttctttctttctttctttctttcgacggagttttgctcttgttgcccaggctggagttcaatggcaagatctctgctcactgcaaccttcacctcccgggtacaagtgattcttgtgcctcagcctcctgagtagctgggattacaggcatgcactaccacacccagctaattttgtatttgtagtagagacggggtttctccatgctggtcaggctggtctcgaactcccgacctcaggtaatctgcctgcctcagcctcccagagtgctgggattacagacgtgagccaccgcacctggccaagaaatttcagtttcttaaaaccagatctcacttcccctttctccttcaagacagtagtttgcccttataattggtgtcaaaaatgtacatgatcatgtactttcattctgccccagtaagtttagtgcaaaataggaaaatttagaacaaaatgtgttaatgataagtgtgaagggatgtataaatatttggccagtaatccaaattcttcagttttttgtttcatttagatgaggaaatagttaagactttctattattattaatctgtgttcagtctttgcttttgtaaataagaatagtctgtgagcaaatctatgtaattgtagtagacacaccaggctaaccttttagggcaagcttttttttttgttttcatttgaaaaattaagagaaaaaatattaatcttcacacaaccctaacactttttgttttggtatgttttcttctaattaaaaaaaagatgcttttttttttttttttttttttgagacggagtctcgctttgttgcccaggtgggagtacagtggcgtgatctcggctcacgacaacctccacctcctgggttcaagcgattctcctgcctcagccgcccgagtagctgggactacaggtgtgcgccaccatgtccggctagtttttgtatttttagtagacacggagtttcactgtgttggccaggctggtctcgaactcctgacctcgtgatctgcccgcctcagcctcccaaagtgctgggattacaggcgtgagccaccacgcctggcaaaaaaaaaaaaaaaagcatgtatttttatatggttgtgattttataatatctattaattatatctgttttttttacatagaataatatagtcatgtatatgtgatcttaataactatcattttttcataattgtgtgatattccattgagtgtatttgttatttacttaattcatattgggagatgtttaggttgtttccgattttcttctctaataaacaatgccatatttaatacttctgtgcgtatgtcctgcttgttgtttgatttatttccaagttcttgttttgacctatctgtagcatgagccaatttaatccttttttttcatccttcaagtactttcttcatttggcttttaagatactattctctcttgatttttctcctacctcaccagcaactttgatagttcctccttatgtccctgatggctaaatgttgtgtttcaggattcagtctttagaccttttctctgtctgcacccaccctcttggtgatctcatccagttttatggctttaaatagcatctaaaggcgtacaagtttcaaatttatttctatctcagacttctttccttgaaattctgttgcatgtagccaactgtgtatctgtcgtatctacttggatgtctgatattcatcacaaacttaacctgtccaaaactgaacttctgaagctgcttcaccagacctgttcctcctatgtcttagcctattcagcaaatgtcagttctatccttccagttgttcaggccccaaattagagatatctttgtctcttctctttctttttttcacattcttatccaatctgatagcaaaaactcttggctttaccttcaaaatatatctagaatcttattgcttcttaccacctccactgtgctactaccttaatctaaaagccactatcttctcttacttgtacttttttactagactctgtttcctctgttaacgtctttgctttattacagtctcctttcaacatagtagcctgagtgacccttttcttttcttttttttttttgccagacagagtcttgctctgtcgtctaggctggagtacagtggcgcgatctcggctcactgcaacctctacctcccggattcaagtgattctcctgcctcagcctcccgagtagatgggattacaggcgcgtgccaccacgcccggctaaattttttttgtatttttagtagagacgggatttcactgtgttagccaggatggtctcaatctcctgacctcgtgatctgcccacctcggcctcccaaagtgctaggattacaggtgtgagccactgcgcccgggcagacccttttcatacataagttagataagacatttctttgcttaaaactattgtcttcccatctcattcagaataatagtcacagtcatttaaaatattgtacacaatctggcttctgcaatttatgacctcatgtgccagcctgtcttgctcaactttcattgggcttttaactttacaaactaggaaagattctgaaaattaaatattttagaagagattaggtttaagataccttattctatctaatttgacagtggctacaattagttaatctatattggggaagtgaagagacacatgagcatttctcatctttagtatagttactaatactaagggccttacatatttactgtgttatctcattatcctctaaacagactgatcagtactattatttttctttattctgcagatgagtaaactgagtaagtgggacacttgggaatcaaggtcaggcccctatggctccaaagcaaaacattcatataatacataaagtgttagtctaaaggtataaaatacttggaatcttttaggcatctgaaaatcttactggtattttgatcatgccagaataattgtccagattgaactatgtcttagatatagtctcttcttttgctgtaaatgacagcaaatatcttaggttttgttttatgtgtagcattcaaatgtcagtggataataaaaaaattcattgaagattcaaagcttcagttttggaaaagaacaccagttagattagaagagtgatgatgacatatttagttgaggttacatttttaatgtttccatgtgttcttagtgattaaaaccccatggggccagtctagtgtgaagaaaaacttttatttagttacttcacaaacgactgtattgtagtgataagaaaggcaagattaaaaacagtcaaatgatatgaagagatgaatttattcatgttacttattcaaacagagttttatgtgggatataacttttctgagatacttaatcgttttttcctttggctaaaccaatgtgttagcttgatgaaacgttatcaagaatgctaatctataaattcagtttagtctttcacaccaacttgttccatttgtacagctgtttcttaagaatcattgtttggctgtcacggtggctcatgtctgtaatcccagcactttgggaggccgaggtgggtggattaactgagatcaggagtttgagaacagcctggccaacgtgatgaaaccctgtctctactgaaaatacaaaaattagctgggtgtggtggtgcatgcctgtagtcccagctacttgggaggctgaggtaggacaatcgcttgaacccgggagatggaggttgcagtgagccgagattgtgtcactgcactctagcctgggtgacagagcgagactccatctcaaaaaaaaaaaaaaaaaaaaaaaacattgtttgtccatatacttaggtttgtaagaaattgagttattctgattccttgctaaggccttcttttaaaagcaagatacgccgggtgcagtggctcacacctttaatcccagcactttgggaggccgaagcgggcagatcacgaggtcaggatatcgagactagcctggctaacacggtgaaaccccgtctctacaacaaaatacaaaaaagaattagttgggcatggtggtgggtgcctgtagtcccagctactcaggaggctgaggcagaagaatcccttgaacctgagaggtggaggttgcagtgagccgagattgcgccactgcactccagcctgggcgacacagtgagattcagtctcaaaaaaaaaaaaaaagcaagattttagtcttaggtttttactgtgttctactctaagcatctaataggctttatatttcacattacccttttaatgaaaatagattaaattcagtaactgacattctttaatagattaaattctagttatttgcaattaaaagtgtgggctgggtgcagtggctcgcgcctgtaatctttgggaggctgaggcaggaggattgcttgaggcctagagttcgagaccagcctgggcaatataatgagaaccctgtctctacaaacaatttttaaaaatcagctgagtgtgagtctgtagtaccagctacttgggaggctgaggtgggaggctcactgaagcccaggaattggagactgcaatgagctgtgatcatgccactgcacttcagcttgggtgacaggttgagaccctgtctcttaaatttaaaaaacaaaaaaggctgggtgtggtggctcagggctgtaatcccagcactttgggaggccagggcgggcagatcatgaggtcaggagattgagaccatcctggctaacatggtgaaaccccgtctctactaaaaatacaaaaaattagcttggcgtggtggcatgcgcttgtagtcccagctactcgggaggctgaggcaggagaatcgcttgaacccgagaggcagagtttgcagtgagacgagattgcgccactgccctccagcctgggcgacagagtaagattccatctcaaaaaaaaaaaaaaaaaaagacttgtttttgcttttgattttatcatttcttttaaaaaactttttgttatttaagattctaaaattatacaaagtcattgtaaaagggttttataaatttatttttttttttttgagactgagttttgctcttgtccaggctggagtgccatggctcgatcttggctcaccgcaacctccgcctcctgggttcaagtgattctcctgcctcagcctcccgagtagctgggattacagtcatgtgccaccacgtccggctaattttgtgtttttagtagagatgggtttttccatgttggtcaggctggtctcgaactcctgacctcaggtgatccgcccgcctcagcctcccaaagtgctgggattacaggcgtgagccactgcacctggcccattaaaaagggtttttaaacgatgatgatggtgaagtgtagaaatgataatgaagtatacaaaaaaaaaaaaaaatcgtctcgtgtttccttaatcccatttcctggatgtaaccagtgttaatagttggtgtataatctttaatgcttttttatatgtgctataaataaatatctgtataattagaatttgcttctaaacaaggtggaataatattgcgtatattgtacataaagttttgtgattattgatctgggacagttctagaagtaagatcatgtggttagaaatttgtacatttaaaatcttgaaatgaactgctagaatttcttcaaaataggttgtactgtcatttctaccagtagtgtatgagaacctcccttttctttcgtgtttttttttttttttttgagacagagtcttgcgctgttgcccaagctggagtgcagtggcacgatcttggctcactgcaacctctgcctcccaggttcaagccatcctcctgcctcagccccccagtagctggaattacaggcacgtgccaccatgcctggctaatttttgtatttttagtagagacagggtttcaccatgttggctgggctggtctcgaacccctgacctcaggtgatacacatgcctcggcctcccaaagtgctgagattacaggtgtgagccaccgtgcttggccgagaatctcccattttcttataccttttcaaatactacgtaatatcattcttttcaatttttgccagagcaaaataaatgatatcttgttggtttagagtcctttaattattagtggagccaagcttttcatgcttgtcagccagttgtatttctctgaattgcctattctaatgatttgtttgtttttcttactgatttaaaggtgttacatgatataaatatatgatataaatgactttatgcaattacaactgctttttttttcctttatgacatctggttttgtgttatcttaggaaagcctctaccttatgtacaactaccaaaaatgcttttagtaagtagtctttttttttttttttttttttttttttgggagatggagtttcactcttgttgcccaggctggggtgcaatggcgcaacctctgcctcccgggttcaagtgattcttctgcctcaggctcccgagcagctgggattacaggcatgtgccaccacccccagctaattttgtatttttagtagagacagggtttctccatgttggtcaggctggtctcgaactcctgacctcaggtgatccgcccgcctcagcctcccaaagtgctgagattacaggtgtgagccactgcgccttagtaagtagtcttatagttttgttgttgttgttgttgttgtttttcaataaaatagggccttgctctgccacccaggctggagtgcagtggtatgatcacagttcactgtaacctcaatctcccggaagctcaagtgatcctcccacctcagcctcccagtagctgggactacaagtgtgtaccaccatgcccggctaatttttttattttttgtagagatgggggctaggctgctcttgaactcctgggctcaagcgacccttttgccttggcgtcccaaagtcctggaattataggcatgcaccaacacacctgaccagtgtacactctttttttttggagacaggctgtcacccaggctggagtgcagtggttcaatctcagttcactgcagcgtctgcctcccaactcaggccatcctctcacctcagccccccgagtagctgggattatagatgcatgccaccatgcccggctacagtctacacttttttcttttttttttttgagatggagtcgcactctgtcgccaggctggagtgcagtggcgcaatcttggctcactgcaacctccgcctcccgggttcaagcgattctcctacctcaacctcctgagtagctgggactacaggcgcgcgccaccacgcccagctaatttttgtatttttagtagagatgaggtttcaccatattgcccgggatggtctcgttctcttgacctcgtgatctgcccaccttggcctcccaaagtgctgagattaaagatgtgaaccaccgcacccagcctacagtctacactctttttttttttttttgaaagaagtctcgctctcgtcccccaggcttgagtacaatggctcaatcttggctcactgcgacctccgcctgccgggttcaaacgattctcctgcctctgcctcccaagtagctgggattaaagcgcctgccatcacgcctggctggtttttgtattttttagtagggatggggtttcaccatgttgtccaggctggtctggaactcctgacctcaggtgatccacctgcctcagcctcccaaagtgctgagattacaggcgtgagccactgtgcctgacccagtctacactcttaactgctggactgtactgtctcttacatagtcaagttgtcttctcatcactgaattccaaataaagaaagtgttacatttgagttgaaagtatcatttagggacaggttatttgatacgtgtaaaatatacttctgcggacatgtcacagtatattttatgtgtgtcatggtaagtaggtgaccaatatcaattgggtaaaatgcctgatcattggaacccagacatttctggctctcattgtagagccttacttattttcatttaaaaatgtctaagagctgtagttgtttgagtttctagctttaaaaagttaagggagcatctggccgggcgcggtggctcacgcctgtaatctcagcattttgggaggccgaggcgggcagatcatctgaggtcgggagttcgagaccagcctgaccaacatggagaaaccccgtctctactaaaaatacaaaattagccgggcgtggtggcacatgcctgtaatcccaactacttggaaggctgaggcaggagaattgcatgaacccaggaggcggaggttgcggtgagccgagatcgtgccattgactccagcctgggcaacaagagcgaaactccgtctcaaaaaaaaaaaaaaaaaaagttaagggagcatcaaataggtaaataaatgactagtatcaatgacttaaaatggctcagcatgtacctatatttaatacattcagaacaactttgagttagaacctagtctctgcagttggtgtatggaaatacatagcataaactggaattaaactggaattctttgtcaccctagtagtccattctagtagtcctatttcacaggatgtgatacacttaaggttagaataatggtagcaagagataaacagacagagtttggggagtctgggagaggaaggagacaaaatattttactaagtttctctcatactgtctttctatctccacccaaactgccccagcttggtgtagccttattgcccttgcctttgctttgatctatactggagtaggctccaaaacggtgtacgattctttgactgtgacctctggtagtaatttaaaaatatatatatttttttgtagggacaggtctcgccatgttgcccaggctggtgtcaaactcctaggcacaagcgatcctcctgactcagcctcccaaagtgttggggctacagctgagagctactgtgcccagtctagacagtagttttaatgttagaaagccttgagggtactacttgaagcaaagaattatatttgaaaacagaattctaaacagtgaaataaatgacagtaccagaagaaagttaacagataggaatattaaaattactaagagaatatactctgtgggttgcatttatcacctgtaagttaggtgagctgattcttgaaatcttttcaagcccattttacttatttaggtcactaattatagagtttgttgtttagaagatggcatctaattaaggtaatgagagagcgagagagagagagagagagagagagagagagagagagagagagagagagagattcctgtgagattcagctgagtcatatcatcagtaattatcttgagaactgtgttggaggagcagtgaatttctgttgctaatgaatatttcattattgtttgaaggaaccggttgtataaaagattactcctggccgggcgtggtggctcatgcctgtaatcccagcactttgggaggatgaggcaggtggatcacctgagatcaggagttcaagaccagcctggccaacatggtgaaaccctttctctactgaaaatacaaaaaagttagatgggcatggcggcaggaacctgtaatcccagctacttggaggctgaggcaggagaattgcttgaacccggaaggcggaggttgcagtgagccaagatcgtgccattgcactccagcctaggcaacaagagtgaaacaacgtctcaaaaaaaaaaaagtaataataataataataatatttcccccaaaataactgacattcataaaatatacagagaaccatattagatgcttactagaagtaacagattaagtaaaatagctactgtttaacaaaagtaacttctccctttatgagtgcctgctatgtgtcaagtgaaatgcagtgtttttacatacattttccttagatcctcagagtagctgaaaggtagatatttttcctgttttagagttagggaaacagactaacagaataagtactttgtctaatgatatgtaaaaataattattgaattattcatcgagtacctccttgtggcaggtattatactacgtgctttatttaacctgattcttatatcagctttctttttcatatatttatgaaaaatatagattttttcataaataaagatattgaggcacagagaggttaaataaatcatccagagtctagaaagtgacagaactgtatttcaaaccagtatcttcttgatttctaaaagtctttacttttttttatttttttttttttgagacagagtctcactctgtttcccaggctggagtgcagtggcgcaatctcggctcactgcaacctccgcctcccgggcaagcggttctcctgcctcaacctcctgagtagctgggactacaggtgcccgccaccacgcctggctaatttttgtatttttagcagagacaggatttcaccatattggccaggctggtcttgaactcctgatctcgtggttcacccgcctcggcctcccaaagtgctgggattacaggcatgcgccaccacgcctggcaagtctttactcttaaccatgtttcctctcatgacttcttcatgttgtaagatacaatttatcacattgacttgcctttcaacttttaaattctgtgaatttttctctctgtaaactaagcaaggtaggacaagtcgattaatatctttacaccaattgtgtataaggaatgtgtgattcattaccagaaagattactattcttgatcaattctgtttccaaattagaatgtattcactgaatatatactatgtttaactgtgttatgatacagaagtgtgaatcttggtcccagaactgaagctattataggataagaacataaacatgatggtttatgctcaactactaaattgtaagtttaaaaatccagatttggagtaagatatacagaatgcacatagatagtaataatttgggcaatggataagtcactgtggctgaacaggtagggataaaagcttacagttcctagctgaatgcggtggcccatgcctgtaatcccagcactttgggaggctgaggcgggtggatcacctgaggttgggagttcgagaccatcctggccaacatgacaaaaccccggctctactaaaaatacaaaaattagccaggcatgggggcgggagcctataatcccagccactcgggaggctgaggcaggaggatcgacttgaacctgggaggcggaggttgcagtgagctgagattgcaccattgcactccagcctgggcaacaagagtgaaactccatctcaaaacaaaaaacaaacaaaaaacaaaaaaaaaagcttacaattcctttgaggctgggctaaggaaattggcctgatgatggagatgttctttggaagagcagccaggtggcaaaggcacagtgatcaaatatgtgattaataggagtgatccagtcctaaacagggatagaggctgagaggcctagtcaagtggtctaaactgcacatgaaaaggaagggaaaaatcggtaacttgagcaatcctttatcatccctacagccactcagttttaggtctgatcagcagttattccactgagctgctggatgagctgagggtggtgatgaaggctgagttatttggtatatatgtagtctaccttatttaatattggctcagttgctgtactcagctctgaagacttgaaatctggctgatgggttatcattctatgtgaagaaagtattgtaaggggagtatagatggttaaggaggtagcagtaaaagcagtgcagaagaacagagatgtgcatgtaagagctcaatgatactgtttagggttgcatttaccaggtagattcttctcactatttttattcttgatagctggggtctttgggacatctaggcttatctattttgtttggctgcaaaaaagtcaggtaagaggaaacacttggaaagcaaaaaataaatgaaggcagagaacatcataaagagatatatgaaaagaagccccatttaaattatttggtaaaatgtgatatacatggtacatcagagatattgcatgcttggattttttggattttacagatacagcaacaatgtatttcattgatgtgaatgccttagagttatcttgagcaagaaactatttttttttttgaaacggagtttcggagtttcgctcttcttgcccaggctggagtgcagtggcgcgatctcggctcaaggcaacctctgcctcccgggttcaagcaattctcctgcctcagcctcccaagtagctgggattacagtcatgcgccaccacgcctggttaattttgtatttttagtagagtcggggtttctccatgttagtcatgctggtctcgaactcccagcctcaggtgatccacccgcctcggcctcccaaagtgctgggattacaggcatgagccaccgtgcccagcctgagcaagaaactttttattgatatcttgaatctccagtataataaagttgggagcagggtcaataaatataaataaataatactttttcctcaaaaatatcatatttttttaaacctaagacatcatcaatcataggagacaccactaggaaaaaaacactgccaagtaaattatgaaactatagtgattgtaaaactaaccccaatttcagaaatgttgcgatgtgcagtacatacattatacagaagttaactatcaattaatatctccttgaacctttagaacttgatctatagtctcacttaagtagattacagtaataagaaagtcagtctctggtttcaatattttgtgactggatatctatagggaaaagtaaatgtaggtaagtgtaggtttttttttgttttttttttttgagtcagggtctctctctgtcacccaggctggagtgcagtggcacaaacatggctccctggggcctccactttctgggctcaaacaattctgctgccttagccttacctgagtagctgggactacaggcatgccaccacgcccacctaatttaaaaaattttttttagagacagggtctcaccatgttgcccaggctagcttcgaacttctaagctcaagcaatcctcccacctcagcctcccaaagtgctgggattatagacgtgagccaccatgcctggccaaaaatgcttccttatattgtcatctttaaagattttctggccaagcatggtggctcccgcctgtaatcccagcactttgggaggctgaggtgggcggatcacctgaggtcaggagtttgagaccagcctggccaacatggtgaaacccggtctctactgaaaatataaaaaattagccaggcacggtggcaggcacctataatcacagctactcaggagctaaggcatgctcctgagattggagattgcggtgagccaaaattgcaccactgccctccactctgggcaacagagcaagaccctgtctcaaaaaaaaaaaaaaaaatctatacttacctgtacttacttttctttatagacatttaatcataaaatattgaaaccagagactcattttttcttattactgtgatctacttaaatgagactgtagatcaagttctaaaggttcaatgagatatcaattgatagttaacttctgtataatgtaagctgtctcaaaacaaaataatataaagatttccttttgtttttagggaaatttctcattcagctcttttctaattgcaggtgaaaacaactggctttttttttaaaaaaagctatatgtgaagcaaatcgtgtgctgttatgcacctaattttgccatgtatgcttaatgaaggaggcaggaggccatttagccatcaagggagataacttggcctagtgcttttctgcagggaagcagttaaaataagtttgaagaaattatatatttaaggagaaggcaagtttgtaacacactaagacaaaatattaactgctgagttttgaatattcttgtggttttcccatgtctactgacatttgaacattgtttagtaatactataaggagatattgagcaaaataagttggaaccctgccttctgtaatctagcttttacatgtttatgtagattaggttaggttaagagaaaataccgtagtattttgtagctatacaaagcatctggatccctgacttcaatggcacttatgtacttgttaagaagacagatcatagccgggtgcggtggctcacgcctgtaatcccagcactttgggaggccgaggtgggcagatcacctgaagttgggagttcgagatcagtgtgatcaacattgagaaaccccgtctctactaaaaatacaaaattagctggccatggtggcgcatgcctgtaaccctagctactcgggaggctgaggcaggagaattgcttgaacctgggaggcggaggttatggtgagccgagatcgtgccattgcaatccagcctgggcaacaagagtgaaactgtctcaagagaaaaaaaaaagacagatcataaataagtagatacataaaggaacaagatcattagagattgtgataaatgccacagggctatattagagggtaattggggaaggccactcacattagataaagggggtcagtgaagctttccttatgaggtgagacctgaggaataatcagccagatatgtgaataattgcaggaaaaacattccaggtagaagaacagaaagtgtaaaggctaggaggtaagaaagagctcgatatttcacaggatcggaaaggagcttgttgtggctcgaatgttgtgaactaggaagagagatgcacaacaaggggttagacaggcaggcaggagccaaatcatttggggatttgtaggccatagtaaagatgaagtttgaattttattttgagaaaataagaaatgctttagaaagagtttaagcagagtaatttcataatctaattttcatttttcaaagaccactctggtttatcggtagagaagaattagaggggaggcataggaaaaacaagaagactggttaggcagatgtgctagtcaagatggccaagggtagtggcaggttggattttttcctctagtactgtcaagtagcattttggtatcattgcaagcctacttctctaatatactgttttttaaatagcagagactctttggatttagagtgtatagttgagtgctgggcttgatggccaatgcctataatcccagcactttgggaggccgaggcaggaggattacttgatcccaggagttccagaccaatccggggagcatagtgagatcctgtctgtacaaaaaataaaaaattagcagggtgtgatggcactcacctgtattcacagctgctcaggagcctgaggtgggagaatcacttgagaccaggaggagttcaaatctgcattgagcacagatgatgccactgccctccagcctgggtgacggagcgagaccctgtcttaaaaaaaaaagaatacatagttgaattagtttattattattatggagatgagatcttgctctgtcactctcaggctggagtacagtggtacaatcatagttcactgcaacctttaaatcctgggctcaagccatcctcctacttcagcctcctgagtagctaggactacaggtgtataccaccatgccaagctaatttttttttttttttttttttggtagagacaacgtctcgctatgttgcccaggctggtcttgaactcctggcttcaagaggatcttcctgccttggcctccaaaagttctgggagtacagggtgagccatcatgccacccttaatgtagtattctttgactgcagaattagatttgaattgaataatacaaaagctgatttttaactatgccttgactgaaaactaaattcttttaaaagtactggtagaggaagtagtcttagagtttagtagatgataatgataatagcacacattgctgttttttcatagttaatgagcataatggttatatttaatgagagttttaaaatttatgtttttatttctacttggtgattttcataacaaattatacttaggctcaggtctcaatataattatctgattagtgcatagttttaaatctttaactttgccactagaaatacacttaatttttaatttagctactaattgtgaaacatttttgtttagtattttgttgttttattcatgtaaatcaatttaagccttttcttatttaaattacttaattctacttctataatctattctaatactgaattccgaactctcctaaattattcttgatttagataaaatggttttaagctggtaactttaaaaaatacaattacttcaaaataatacacatacatgacagaaaaaattcaaattgtgaaagggcataaaatggaaagaatattttataacattcttattatctaagccaggcaaaggttggcagctttctttcagttggatgtcactcagcctattgagtatgcaaatgtcttttgtttgcatgccacccaactcagcagtagtgagtgaaggagaactgatgaagattgccaacagtacctcacatctcatctccccttttatataagagtaaaattagatggcatgtggtggcaatacctgaaaggaacatggttctaagagtgaatttaaatagtttatcatttgtattaatagatgttttttactccagtaggtgcacatttttctggtagtggatacagacaattacagtgtactaagaactttgctgaagcatttcaaggcaaaggtattaaaataaaaatagataaaagtggtttgttttgctaatgaattttggagataatgatcagtagaccgcatttaccaagtgtggcacgccaactgaaatatcttcatcttctgtataggttgttaatccttaatacatatgtaatacttagtcttttacttggtataagtcaatgagatggttaatcttcattatataacattttaagttgatataaatgagcagtattttgggggttttatttttaaagcaaaaggtgagccaaaatattaatctttaacaaatatagtggacaaaaatttgttgagaaagtttcagattaaggaatcatgcagcatcaaccaaggagcctcaacataataattaacccagcttcttaacaaagatatgatttaatttttgttgttgaatgatttcaagactacattttccttttgggattgttctgtatgatgcagtaaaatgttggaaatcacagtgattgcttaaaatgaacatgctgcaaaaagggctcaaaagtgctttttgtaaagagctctattgttagtacaattttgctcgtgggtcctctgtcttttaggggaaggctgtaatgcctaaaagttgccagtgcttcattaagctaatgctgaattatagccagacattcagtgatccagaccccagacttccctgccatccaagaggagcagttggggaagggaatgaggtggaggtgggaggtggaataggccttttttacgtagtaactttatgtatttattgtgtcaaatgagtttagcatacttgtgttattagaatcaatttggccgggtgtggtggctcacacctgtaatcccagcagtttgggaggccaaggtgggtggatcacaaggtcaggagttcaagaccagcctgaccaacatggtgaaaccctgtctctactaaaaatataaaaagttagccgggtgtggtggcacacgcctgtatcccagctactcaggaggctgaggcaggagaatcgcttgaacccaggaggcggaggttgcagtgagctgagatcacaccactgtactccagcctgggcaacagagtaagactccgtctcaaaaaacaaaaaacaaacaaacaaaagaaagaattaatttaagccttgaatgctctctaactttttctcccattagcctttccattttttttttcagttaataagaaacaatactgatagcaaaacttgcattgtgtgtgtgtgtgtgtgtgtgtgtgtattttttttgagacagagtcttgctctgtcactcatgctggagtgcggtggcatgatcttggcttgctgcaacctccgcctcctgggttcaagctattcttatgcctcagcctccctagctgggactacaggtgcatgccaccctgtgttgctaatttttttttttttttgagatggagtttcgcttttgtcgtctaggctggagtgcaatggcgcgatctcagctcacagcaaattccgcctcccgggtacaagccattctcctgcctcagcctccggagtagatgggattacaggcatgcgccaccacgcccggctaattttgtatttttagtagagatgggatttctccatgttggtcaggctggtctcaaactccggacctcaggtaatccaccctcctcggcctcccaaagtgccgggattacaggcatgagccaccgcgcctggctgtcctgctaatttttgtatttttagtagagatgaaccctctccctccccttcccctcccctcccctcccctcccctcccctcctcttttcgagacagagtcttgctctgttgcccaggctgaagtgcagtggcgtcatcttggctcactgcagcctccgcctcccgggttcaagcaattctcctgcctcagcctcccgagtagctgggactacagttgcgcactgccacgcctggctaatttttgtattttttgtagagatggggtttcaccatgttggccaggatggtcttattctcttgacctcgtgatcctcctgccttctccttccaaagtgctgggattacaggcatgagcctttttttctcgtataattttgaacaaaataatacttagtttttcattcaaattagaaatttaagtaaaagtgatacctctagaaagttaacgtttgactcattttaagaaagcaagattataatagggtcatcttatttgttcagattctttagatttcatatttttatattttaaaaagtttcaaacctactgaacattttactttatgtggatgtacactcacttaagagtgagatattgcagggcgtggtggctcacgcctataatcccagcacttttggagtccaaggcgggtgatcacatgaggtcgggagttcaagaccagcctgaccaacatagagactccctgtctctactaaaaatacaaaagtagctgggtgtggtggcacatgcctgtaatcccagctgcttgggaggctgagggaggagaattgtttgaacctgggaggcggaggttgtggtgagccgagattgtgctattgcactatagcctggacaacaacagcaaaactccgtctcaaaaaaaaaaaaaaaagtgagatattaagggcttttactttctatattttatatttctatgatacttgaatatcattttaccaaatttgtaagtcttataattactgtgattagaaatataattttaagccctaataaaatgacttattgtcattttagagctaaaatttgtcttgtttctttgggttgtttttttttttttttgagatggagtcttactctgtcacccaggctggagtacagtggcatgatctcggctcactgcaacctccacctccctggttcaagcaattctcctgcctcagcctcccaagtaactgggattacaggcatgcaccactgcacccggctaatttttatatatttttttagtagagacagggtttcaccatgttggccaggctggtctcgagctcctggcctcaggtgattcgcccgccttggcctcccaaaatgctgggattacaggcgtgagccactgagcctggcctaaaatttgtcttttgctaggtatatggatttgtagatgagtgtgcagtagcaatgatcatagtttattttatgaattaatagttaatgaacatcagatattggtgatacagcaataaacgagataaatatatttccttttggagttcatagttaaggtttgttacatgggttgggtatattaggttgggtatattgggtggtgctaaagtttgggcttctactaatcccatcacccaaatagtaaacatagtacccaataggtggtttttcaacccgtgccctcttccctccctgcttttggagtccccagtgtctatcgttccaatctttatgtgggtggagactttttttttaagacaggatcttgctctgccaggctggagtgccaggttggaggctcactggcacctcaaccttccaggctcaagcaatcctcccacctcagcctcccaagttgctgggagtacaggcgtgtgcaccatgtccaggtactttttaaattttttgtagagacagggtctcgctatgttgcccaggatggtatcaaacttctggactcaagtgatcctcccatctcagcctcccaaagtgctgggattacgggcacgagccatctcacctagccctgtgcactttttaaactccatttacaacattggtcagctttttcttattgtactataaattggacattaatgaagttttgtggtcctgaagcctgaaaaaaaagtcagatacagtaattagaactgtttaactgttccatcatttcctctgctatcttatttttattcattctgtagaagtccagacaggaaaaggttgattgttggtagggtgactatataatttgcaagtcccagggcaaaataaaaatgggggctcccttattcaaaaagcaggaaaaggggcagggcgtggtggctcatgcctgtaatcccagcactttggagggctgaggcgggcggatcacgaggtcaggagatcgagaccatcttggctaacacggtgaaaccccgtctgtactaaaaatacaaaaaattagatgggtgtggtggcgggcacccatagtcccagctactcaggaggctgaggcaggagaagggcatgaacttgggaggcggaacttgcagtgagccaagatcaagccattgcactccagcctgagcaacagagcgagactccgcctcaaaaaaaaaaaaaaaaaaaaaaaagcagggaaaatgtgctgctaaaggtactaaaatatataccttttttctttctttgtagtgtctccttcaacttgtcatattttaaaaaaatttatcatctaatgtcagtctaagcaaagaaaaattagaattttaaatcattagcctgtattttactgttcatccctatatgttgtgtagtgtccatttaaaatgcaaatataagaatatttacctcatttgtggaaactgaaattatacagtcattttgtagttgcacttgcatgtgtagtttgtttttgctagaacagtagaaactctgtacaaacgaactcagtggtttgtatttcacttcttgatgaatacatattctaccaacattctaccttctgcttactgatgagtagggaaggactgagaagaaaaggaattatgggtggccctatctctacctttacttttatgttattatatccagcataagtggttgattaatataggcaagtaataggagaaataaaggatataatagggttccttcattgttagtttcataaaacaccattgccttctttctgtgttccgagtaagttgtagccccttggggctgtgagcaaccccctccagtgagaattaatacaattttctttgtactctatggcagagaagatgctcttactttgttttgttttgagaaccctggctagtccttgtcaggaggatgctaggctttatgggtttaaggaaattggttatatgctgttaaccatttatacagtaataaattgtttaataggaatttaaggcccaggccataacaggagtcctactgttttattttctggaaagtgaatgtagtttcatgagtgtggaatatttgtagcatattaaaattgctctctaggtacagttagcttatcccttatggttttaccctgctgtaaggggaaaccatacagaattgagcatcaatgaataaataaacctctgccagagattggcaggctttttggatcatggtgtcattccaagttagggttaggcacacactagaggctgtgacttggtaattcaagtgtttcacttggttgctactgtgccctggctgctatgcaaggatggcaagaatggcgtaataaacttaaagctgtagtaatgctataattgtctgatagtagtgattaaggtctgggttagtatacccgaggagtcctgttcaggtgttattcttttttcttttttactttttctttttcttttttttttgagacagagtttcaaacttactcgattgtcacccaggctggagtgcagtggtgtgatctcggctcactgcaacctctgcttcctaggctcaagtgattctcctgcattagcctcccaagtagtttgaactacaggcatgtgctaatttttgtattttttttttttgagtagagacagggtttcaccatgttggccaggctggtttcgaactcctgacctcaaatgatccgcctaccttggcctcccaaagtgctgggattacaggtgtgagccactgcacctggcctaatttttgtatttttattagagacgggactttgccatgttgctcaggctggtcttaaactcctgacttcaaactcctgatccatccttcttggcctcccaaagtgctgggattacaagtgtcagccactgtgcctggcctcagctgttattcttcatgcgtatatttgttttgttcatttggggcaccttgttggttatcataaattttggtgtgatcaggtactgctccttaataatactgtatttggctgggcgtggtcgctcacgcctgtaatcccagcactttgggaggccgagacgggtggatcacgagatcaggagatcgagaccatcctgacatggtgaaaccccgtctctactaaaaatacaaaaaaatcagccaggcgtggtggcgggcgcctgtagtcccagctactcgggaggctgaggcaggagaatggagtgaacccgggaggcggagcttgcagtgagccaagatccagcctgggcgacggagttccgtctcaaaacaaaaacaaaaacaaaaaaaaaactgtatttatactttattctgcataacttcttttaactcaggatttctttttctttttcttttcttttttttttggagacggagtctcgctttgtagcccaggctgaagtgcagtggcgtgatctcggctcactgcaagctccgcctcccaggttcactccattctcctgcctcagcctcccgagtagctgggactacaggtgcccaccaccacgcctggctatttttttgtagttttagtagagacggggtttcaccgtgttagccaggatggtctcgatctcttgacctcgtgatctgcccgcctctgcctcccaaagtgctgggattacaggcgtgagccaccgtgcctgggctttaactcaggatttcataaagaaaacaagattgagaaaaaccaaatctgtttgttgtataaaataatgtatagctctgaatagtcatgtctgattttgggtaaaatgctaaaagactattcttctatgaagtgctttttacttttgcagttttaggtggcaaaataatttcatattcttatttcctcacagaaaccatatgtctgtggttgcttcttagctctatcaaatatccacctaagtgcaccagtaggttaaattgtttctcataaaaggttagttttgacaaatttttgctgttagcttttcattatcaccagatcttgactgtactggcacaatggtgtataaaatctagagaggaaacaaatcaatgtgaaccatagcatagttaatgggtcttctccaaagcacttatttggttagataaaagtacataaagcacttctcactgtgtctggtacagaggggaggcatgcaacaaatgtttttagaataaataaaaattcagttcttgtaagcattagtattaattacatgaaggacttccaggcactgtaatcagtcttctatctttgagatttgaaagaagcaggaaatagggcgtaggacctacaaggaaacaggaagattatccatgtttttatttcgcattccacttgaactatcttggaaacacagggtataacatcaaacaatggtcatataagtattttttaaaatttgtttttatctgttgctttatctgctttgtggtatattattgtattctatgtctggacatgtctggacgttttcagttgattcattaatatcaggagtagtgtgagtgtttccttgtcaaggagatactgcattttcttcctagtcccataattagccaaaggaacaaactactcttcttaaatgttcatcaaaacaggtatatgagtctgggcgcagtggctcacgcctgtaattccaacactttgagaggccgaggtgggtgaatcacttgaggccaggagtttgagaccagcctgggcaagacggcgaaaccttgtctctataaaaaatacaaaaattaatcaggtgtggtggtgcacacctgtaatcacagctatttgggtggctatggcatgagaatcacttgaacccagaaggcggggaagttgcagtgagctgagatcgcgccacttcattccagccttcatgcagagcaagactctgtctcaaaatatatatataagattacacatatatttcaaaaaaattatattttccaaaaccaaaaaccccacaggtatatgatctgtaaaacaggctggacatggtggctcatgactgtaatcctagcactttgggaggctgaggcaaggaggatcacttgaacccaggaatttgagacttgcctgggcaaaatagtaagactctgtctctattaattaaaacaaaaacaaaaacaaaaatgacagacatatgatctccgaaacaaacgaatcatgcaggtcaaccaggatgtggggagaactcaaaaaggtatataaacaataacacacaaacctaattgtattataaatggataatacactgaaggggttggggaagaaaataacttgtctaagatactttggaaaattataaggctaaagacaaaaagaattatatgcaaatattgtggtgtcattagtaagtttctttctcataggggcaggggttagcaattctactttatatatatacttaacagtaaacaaattagaaaatattgtggataataagacctaggttcctaactctctccactgagaggacctagaattaggaataccacagtagcagtgaccacaatagtgccccagatcttgatttcttttctttttctttttttttgacagtgtctcaccctgtcgcccaggctggagtgcagtggcacggtcttggcttactgcactctccacctcctaggttcaagtgattctcctgcctcagcctccctagtagctaggactataggcatctgccaccacgcctggctaatttttgtattttctgtagagatgggatttggtcatgttgtccaggttggtctcaaactcctgacctcaagtgatccgcccgcctcggcttcccaagatgctgggattacaggtgtgagtcaccatgcccggccccagatcttggtttctaaataacattctccactaataagaacccttgagaaatgactgattccaggactgaggcagggaaaatcaaaatgaacctgaaacatttaatggtatcagaaagtaactaaaaaatgataggggcatatgaaaggatctaaccaacttgaagagatagttccattggtcaaagctaagacaaaataaataatcatagtattggattcgaatccatagaatataataaatatcagtgagtccatactaatataaacaagggagaaaggacagcctatctatctagctagctagctatctgagacagtctcttgctctgtcacccaggctggagtgcagtggcacgatctgggctcactgcaagttccacctcccgggttcacaacattctccttcctcagccacccgagcagctgggactacaggcgcccgctgccacgcccggctaatttttagtatttttagtagagatggggtttcactgtgttagccaggatggtctcaatctcctgacatcgtaatccgcccgcctcggcctcccaaagtgctaggattacagacgtgagccactgcgcccagtctttttatttttaaaaataataataaaaaatagtaaactttatttttagagcaattttatgttcacagtaaaattgagaggcagctctttttttgtttttacagtagaatttcagttaataaatagaaggagtgatggaaatagaaaatcatcattaggcgatctccatggcaggttcttgttgcaggcaagaatcaaccaatggatgctaaaattagtgggtgaaagtgtggtaagaaacacggtatttaaataggctctaagtatctgccctacaaaatacttattcattacaaaggggaacctttgtaatgtaacactggagaaatctggatataccactctaacctggtgacacattgacatctgtcagaagacaaaaattttgacaaaccaagtttaaagattaattggcttttattagcaattcatgaatcaggcagcatcccatctaaagatttacaaaggcactccaatgagctgagcagtggaggcaggctttattggtagaaaaaagctgaagaaggcagaaacaaggaaaaagagtgattgctcattacaaaattactttccttgtagggttaaaacagaggaacttcattatcttgctagcacaaataaactgggccccttctgattggttgctgtgaatggcctgtttgttggaaaactggcccattttattgttcagtttgattatgtggtgcctagcaggagtgactccattcaggttttgtgtgctctgttggagtctagtgtagaaactcagcccaaaacagtggctttctatacgtttatttaacacgtcagatgcttcctgatgcagtgcactgagaaggacatagcatcgcctctgtggtattttttgccaggaaaggtaatttttgtctaatcatgagaaaacagagataaacccaaattgaggaacattctacaagataacttcccagtactttaaaaaagtctcaaagtcataaacaagaaagaactgagggactattgcatattggagcgatctaaagaagtattacaatttgtggaattcttgattaaatcctggaccagcaaaaggacattagtgggaaaattgatgaaattcaaatgagatcttatattgaagttaattgtgtcagtgtacatttcctggttttcataattgcaagtgattatgtaaggtttgttaatattaggagcagctgggtaaaggttatacaaaaactctatactatttttgcattttttctgtaagtttaaaacattttccaactaaaaagttgaaaacacatgtattagagacacatgcgtatgtgtctctaataatcttaaatatatttaagatgatagaaggaattcttgagatagtaaaatgaagtcaccaaaaaacaaacaaagaaacaaaacgaaatcaccaaaatctatcaataaatttcaggtaatacttttggcagattcattctttgagatggagtctcactctgtcgcccaggctggagtgcagtggcgcaatctcggctcactgcaagctccgccttctggattcacgccattctcctgcctcagcctcccgagtagctgggactacaggtgcccgccaccatgccctgctaatttttttgtatttttagtagagatggggtttcactgtgttagtcaggatggtcttgatctcctgacctcgtgatccgcccgcctcggcctccgaaagtgctgggattacaggcgtgagccaccgtgcccggccgtttctgttatactttaaaaaatataatttatatttggcacctatatttctcaataaaaatataagcaggaatttttagttttgtaaattttataatctgggtctaataaatcttaaagggatactagagtttatgtaatcattaaccacattattttagacatttttttgtgcaaactgattttcttatgtttatacctatggtcttcagtaattactatttcactgatagttgtaagaatatgaaattaaggcaggaagaggagaagtattagtttaatgtgtactatatgctgtgtgtgtgtgtgtgtgtacacacttacatgctgttgattctcattgttcttggattccatatttgtaaatgttcctactcactgaaatttatttgtaacccccaaattaatatgcatagtgtttttgtagtcatataaggatatctatagagctgtgaaaaatgtaagtcacctgatgcacacgttctcagctgaggtcaaacaaggccacattctgacttcttgtttcaggtctcatgccataaacaaatgtcctgttcgtggcccatttagtgccatatttttctcatttttgtgctttttgctggtgatttcactgttcaaaatggcccacaaatatagtgctaaagtgttgtctggtgttctaagtgcaagaaagctcttttccttagggagaaaatacctatgttagataatcttcagtcagtcatgagttatacaggcatgaattatagtgctggtagccaggagttgagtgtcagtgcatcaacaaaatatattaaagtgactttaaacaatcacacgcacacaaaacaacattatatattgatctgttaatgcaaatgtggtgagcacaggcttatagcaatctaaccttgtatttctcctagaagcaatggttcattgttcactaattcagtgtttgcaataactatatagaacatacaagaatcatttgtatgtgtgtgatacccatctatctaatatatattacatattgttcattatatattaaaaatgttattaattatattactttttttttttgagatagggtctcactctgttgcccaggctggagtacagtagtgttattttggctcactgcaacctccacctcccgtgttcaaatgatcctcccacctcagtctcttgaatagctgggaccacaggcgtgcactgccacgccgccaaattttttgtatttttagtagagatgaggtttcaccatgttgcctaggcggtgtggaattcctgagctcaagtgatctgcccaccttagcctcccaaagtgctgggattacaggcatgagccaccacgcccaaccttatattattaatatatgtttcatatatacatatacatacacaggcataccttgtttattgtgcttcactattgcacttcacagataactgtgttttgaacaaattgagggtttggggtaactctgcatcaagcaagtcactcaacaccatttttccaacagcatgtgctcttttcatgtctgtgtcatattttggtaattcttgcaatgttgcaaacattttaattattacatttgttatagtgatttgtgatcagtgatctttgatgttactattgtaattgttttggggcaccaggaaccacacccatataaaatggcaaacttaataaatgtttgtgttctgactgttctatcagctgttgttcccctgtctccctgttttcaggcctccccgtttcctgagacacaaatattgaatttaggccaattaataaccctgcaatggcctttaagtgttcaagtgaatgacagagttgcacgtttttcactttaaatcaaaagctaaaaatgattaggcttagggaagaaggcatgctgaaagccaagacaggctgaaagctaggccttttgctccagttagccaagttgtgaatgcaaaggaaaagttcttgaagaaaattaaaagtgttactccagtgaatacaggaatgataagaaaattaaacagctttattgctgatagagaaaaagtttaagtggtctggatagattaaactaactacaacattcccttaggtcaaaacctaatctcagagcaacaccctaaccctcagtcttgtttttttcttttggagacagagtctccctctgtcgcccaggctggagtgcagtggttcaatcttggctcactgcagcctccacttcctgggttcaagcaattctcctgcctcagcctcctgagtagctgggactacaggtgtgcaccaccatgcccggctaatttttgtatttttagtagagatggggtttcgccacattgtccaggctggtcttgaactcaggtgatccgcttcccttggcctcccaaagtgttgatattacaggtgtgagccaccgtgcccagccccctcagtcttctgtgaaaactgagagaggtaaggaagctacagaagaaaagtttaaagttagtagaggctgaatctcaacagattttcaatgtagatgacacatttttatgttggaagaatataccatctaggacttttataactggagagaaattgttgggctcagtggctcacacctgtaatcccagcactttgggaggccgaggcgggcagatcacctgaggttgggagtttgagaccagcctgaccaacatggagaaaccctgtctctactaaaaatacaaaaaattagctgagtgtgttgctgcatgcctgtaatcccagctacctgggaggctgaggcaggagaattgcttgagcctgggaggcggaggttgcggtgagccaagtttgcgccattgcactccagcctgggcaacaagagcggaactgcatctcaaaagaaaaataaataaataaataaacgtaactggagagaaatcaatgcctggcttcaaagcttcaaaggacaagtcagctctcttgttaggggctaatacagctggtgactttaagttgaagccgatggttatttaccattttgaaaatcctagagcccttaagaattatactaaatatgctctgcctgtgctctatgaatggaacaacaaagcctgaatgacagcacatctgcttacagcatgacttactgaatattttaagcccaccattgagaactactgctcagaaaaaaagattgctttcaaaatattactgatcattgacaatgcacccgatcacccaagagctctgatgtagatgtataaggagatgaatgttgttttcatgcctggtaagacaacatccattctgcagcctatggatccaggagtaattttaactttaaaatcttatttaagaaataatatttcataggctatagctgccatagatagtgattcctctgaatctgagcaaagtaaatgcaaaacattctggaaggaattcaccattcaagatgcctttaagagaatcagtgattcatgggaggaggttaaaatatcagtactaacaggaatttggaagaagttgattccaacctttatggatgactttgataggttaaagacttcagtggaggaagttactgcagatgtggtggaatagcaagagaactagaattagaagttgaacctgaagatgtgactgaattggtgcagtctcatgagaaaatttgaatggaggaagagttgcttttttttttttctttttcagaaagggtctcactcttgcccaggctggagtgcaatggcgtggtcacagctcactgcagcatcaacctcctgggctttatcaacccacctcggccttccaagtagctggaactacaggtgtgcactaccacacctggataatttttttttttttttttgagatggagtcttgctctgtcgctaggctggagtgcagtggtgcgatctcggctcactgcaacttctgcttcctgggttcaagcgattctcctgcctcagcctcccaagtagctgggactacaggcacgtgccaccacgcccagctaatttttgtatttttagtagagacggggtttcaccgtgttggccgagatggtctctatgtcttgacctcgtgatccgcccgcctcagcctccctaaatgctggcattacaggcatgagccactgtgccctgtttaaaagttgcttcttatggatgagcaaagaaagttgtttcttgaggtggaatctacttgtgcagacgctgtaaacattgtttaaatgacaacaaaggacttttttctttttctttttctttttttttttttgagacagagtcttgcgctgttggccaggctggagtgcagtggtgtgatcttggctcactgcaagctctgcctcctgggttcacacgattctcctgtctcagcctcccgagtagttgggactacaggcacccgccaccacgcccggctaattttttgtgtttttagtagagacgggatttcactgtgttagccaggatggtctgaatttcctgacctcatgatccacccgccttggcctcccaaaatgctgggattacaggcgtgagccgtggcgcccagcctagcacatttttcttttttgaaatggagtctccctctgtcgcccaggctggagtgcagtggcacgatcttggctcactgcaacctctgcatcccaggttcaagctattctcctgcctcagcctcctgagtaactgagattacagggacctgccaccatgcccggctaatttattttttttgagacggagtttcactttttttgcccaggctggatggagtgcaatggcacgatctcggctcaccgcagcctccgccttccgggttcgagcgattctcctgcctcagcctcctgagtagctgggattacaggcatgcgccaccatgcccgtctaattttgtattttttagtagagacagggtttctccatgttggttaggctggtctcaaactcccgacctcaggtgatacgcccgccttggcctcccagagtgctgggattacagacatgagccactgcgcccagccttccatgaagtatttttaaattaaggaatgtacattacgttttttgttttgtttttttgagacggagtcccaaggcaggagtgcaggggcctgatcatggctttttctatattccttttttttttttcttttttgagacagcgtctcactctgtcacccaggctggagtgcagtgctgccatctcggctcactgcaacctctgccttctgggttcatgccattcttccgcctcagcctccccagtggctggaactacaggtggccgccaccacgcccggctaattttttgtttttttagtagagatagggtttcaccgtgttagccagggtggtcttgatctcatgacctcctgatctgcccaccttggcctcccaaagtgctgggattacaggtgtgagccaccgtgcctggcccgtcatgtttttttttagacctaatgccattgcccacttaacagactacagtataaacataacttatatatgtactgagaaaccaaagaattcatgtgatttgccgtactgtgatatttgctttattgcagtgttctggaactaagcctgcaatatcactgaggtatgcttgtatttcttatctaatctttctaaagcatccaggcccttctacatgaggagtgagaacagacaaaattaagtgatttgcccaatataatagccagaactcagggtctggttccaaagtctgcagattaaaaatctctttttagatgacattatctgttttgcctaagacatacagtaaaggcatctgtaaatttatcttgacatttaattagatgtgttgacaaaaagactcaaactctgtaaaatatttgaagagatttattctgagccaaatatgagtgaccaagggcccatgacacagccctcaggcaatcctgagaacatgtgtccaaggtgcttgggttacagcttgattttatacattttagggtggcagaagttatagataccagtcaacacatgtaaggtgaacattgtttcagttcagaaaggggggacttccaggtcataggcagattcaaagattttgtagttaagttaccctctgaagacctggaatcaatagaaggaaatgtctgggttaagataaggggtgggggagaccaaggttcttatgcaaatgaagcttccttgtagcaggcttcacagagaatagattgtaaatgtatcttatcagtctttaaaaggtgccagactgttagtggattctcttctggatcagggaaaagacctggaaagggaaggggattctctgcagaatgtggattttcccaagagacagctttgtaggctatttcaagatatggcaaataaacatatttggggttaaaatattctgatttctttccttatctgtcatgtgatgttatgtcagagtcaggtaagccacattatgtagggttaaataaaacccctctgatgagactatggtttgtaaggcgtgactccccaggtccctcagatagaaatttgaggagaagaaaaaggtcagagtttagtcctcagatggcaagaatagtaagatttccctcatatctttctatttgaaaattaaattgccttcattttaaagtcaaatttaacattatgtatttttgttttaacaatttacttttttattcagcgattcacttatttaaaatgccatgtactaattagcgtaacattttctaggtagtttttaaaaatttcttttgggatttatgtttatttttgttcatttatttatttttattttctattttttgagatagagtcttgctctgtcactcaggctggagtgcagtggcaagatctcagctcactgcaacctctgctgcccaggtttaagcgattctcttgccttagcctcctgagtagctgggattacaggcgcgtgccaccatgcttggctactttttgtatttttagtagagatggggtttcagcatcttggccaggctggtcttgaactcctgaccttgtaatccacccgtctcggcctcacaaagtgctgggattacaggcatgagccactgcacctggtgtatgttttttttaaatgaagtcttaactgggaaatgtgaaacagtgaagtatttcagtttccataagtaagatcttaaatgtttagagtgtcaaatgtctctagaagaaaacagcgtcttgttgattctttagcttttcactactctttacaatgcttttccccgaaaagcaatatgagaaattagaaaaaaggttattaaaaacccaagggggccagacacagcgattcatgcctgtaatacgcgcactttgggtggccaacgcaggaggatggctttaggccaggagtttgagaccagtctggccaacatagtgagacctcgtatctattttacatattttaaaaattatattaaaaaattaaaaaaatcccaaagggaatggaatgatagtcatttgctgtaaagaaatcagaagattttcataataatgcttttatcccttccatttttcctctagagttataattgaataattaattgccttatgttgcttattgcttataataattagggaaattaggatgtatctaacaaaaaataaaagactaagaaaaaaatacaaaagactcttgaccatcaaaaggtagctttataaacatctattcaaaatacatttattcaaagaaataatgagcaattacaaaattaaacttgagaatatccttattaaataagatagtatagttaattaaaataatttatacagagaaactgtgaattttattgctttgtcttaaaacattcagactcctttctaacattgtttacagttaaggtttttgggtttaagttgaaggatgaggcctgctaacattactaaatatgcgtttataaccctatacgtcctgtctggagtatgcaaacatctgtagaagcatgatttttttttttttttttttttttttttttgagacagagtcttgctgtcgtccaggctggagtacagtggcatgatcttagctcactgcaacctccacctcccgagttcaagtgattctcttgcctcagcctcctgagtagctgggaccacaggtgcatgccaccatgcctggctaatttttgtagttttagtagagatggggtttcaccatgttggccaggctggtcatgaactcctgacctcaggtcatccacctgccttggcctcccaaagtggtggaattacaggcatgagccaccacgcccagccaggatgaggagtttttaaggcaatataatgcaatatttagtaattgattcctttaatctatgaggtccaacttagaaggaacaaaaatgttaccaggcttcatttaaaaaagagaaattgaggccagccatggtggctcacacctgtaatcccagcactttgggaggccgaggcgggtggatcacttgaggtcaggagttcaacaccagcctggccaacatggtgaaaccccgtctctacaaaaatacaaaaaaattagccgagcatggtggcacacgactataatcccaggtacccgggaggctgagacaggagaatcgcttgaacccaggaggcggaggttgcagtgagctgagatagtgccattgcacaccagcatgggcgacagagtgagacttcatctcaaaaaaagggagaaattatattgaggccagcctggacaataagaccacatctccaaaaggaaaaaaaaaaaaaaaaaagtttaaaaccaggtcaggacctatttgcagatgtacagttatcatcacagaaggctttcttctccagaaatttaactttgtaactagtattcttagcactatagtatttgatagcaaagctacccgcccccacctttttttttttttttaaaacaagttttgcattatacaagactgaatggtgcttggcagagaggaattttaagaatttggaagggcaggagaatggcgtgaacctgggaggcagagcttgcagtgagcggacattgtgccactgcactccagcctgggcgacagagtgagactccgtctcaaaaaaaaaaaaaaaagaatttggaagtagggaggtgaatggaactagactttaactgtagactagaagcttccctttcccagtctctgcccattaaaaaaaaaaaaaagtcacttccactagaagattcatagatgttgggaaaacacaactgggggaacttttgattttcttttttaatgtgggatgggttgagcaggagtactcaagaaattgataggtaactgtagagtaaataacatgtaatgtcattttaaagtttgtattttgttgtggtggttgttttgagatggagtctcgctctattgccaggctggagtgcagtggtgcgatctcggctcagtgcaacctccgcctgccaggttcaagcggttctcctgcctcagcctcccaagtagctgggataacaggcacaaaccaccacacccagctaatttttgtatttttagtagagacagggtttcaccgtgttggccaggctggtctcgatctcctgacttcgtgatctgcccgcgtcggcctcccagagtgctgggattacaggcgtgagccactgcacccggccgttaaagcttgctttagtaagcagaaaacactttcaaagatacatgtgaatgacagctgctatttgtcttgtagctgattcaaagtactcatcataaagttgtttttttgttttttttgagacggagtcttgctctgtcgcccaggctggagtgcagtggggcgatctgggctcactgcaaactccgcctcccgggttcccaccattctcctgcctcagcctcccgagtagctgggactacaggtgtccgccaccatgcccggctaattttttatatttttaatagagacggggtttcaccgtgttagccaggatggtctcgatctcgtgacctcatgacccgcctgcctcagcctcccaaagttctgggattacaggcgtgagccatcgtgcccggccataaagttttttaagttagccatttccagtgtctgatcttcagtgaagtttgtaaattgtttttgttttgttttgttttgctttgttttgagatagagtctccctctgtctcctaggctggagtgcagtggcatgatctcagctcactgcagactctgcctcgtgggttcaagcgattctcctgcctcagcctcctgaatagctgggattacaggtacatgtcaccacacccagttaatttttctgtttttcgtagagatggggtttcaccattgttggccagactggtctcaaactgctgacctcaggtgatccacctgcctcagcctcccaaagtgctgggattacaggcatgagccactgcacccggcctgtatattcttttaaaataataaagatagggagctagatattagtaaaaagtagcaacaaagatgtaaggatcagatgatgacccaaggactgttagtggagggttttgccatgttggccaggctggtcttgaactccaaacctcaagtgatccaccctcctcgcccacccagagtgctgggattacaggtgtgagccaccatgcccagctgacaggtgaaatactaaaaaataacatggctaggctcaaaaatgaagcttaacacctccttggaatagaaaagcaaagtgttctacctaactgaactctggggccagaagttggcagtttttcccatgatttcttgccaggctgacagggtccaaaagtgaccatgtgagaaggagatcagaacttggctcccacttcagacacgggggctgtgtctccttgaaaggatgccagaaagagaacagcatcttgcttcttggtgttaaaaacttttttcattggccaggcactgtggcacacacctgtaatcccagcagttgaggaggatggggtgggaggattgcttgagcccaggagttcaagatcagcctaggcacagtggcaagacccttttctgtctctacaaaaattttaaaaatttctcgggatgttggcgtgcgcctgtggtcccagctactcaggacgctgaggcaggggtatcgtttcagccaggaattcgagtctgcagtgagctatgatggcgccactgtactctggcctgggcaatagcataagacctcctctctaaaagagaaatgataaaaggccaggtacagtggctcatggctgtagtcccagcactttcggaggccggggtggttggattgcttgaggccaggagttcaagaccagcctgaccaacatggcgaaaccctgtctctactaaatatacaaaaattatatttgtttaattacataccacggatgtggtggcccgtgcagacgtcccaactacatgggaggctgaggcgtgagaattgcttgaaccttagaggcggaggttgcagtgagacaagatcatgtcactgccctccagcctgggtgacagagcaagactgtctcaaaaaaaaaaaaaaaaaaaaaggccaggcacagtggctcacccctgtgatcccagcactttgagaggccgaggcgggcagatcacttgaagtcaggaatttgagaccagcctggccaacatggtgacaccctgtctctaatgaaaatgcaaacgttagctgggcatagtggcatgtgcctgtaatccctgccacttgggaagctgaggcaagagaattgcttgaacccaggaggtggaggttgcagtgagccaagattgtgccactgcacttcagcctgggcgacagagcaggacttcgtctgaagaaaaaaaaaaaaacacgttttttataagctgtggccctaggtctggcgtggtggctcacgcttgtaatcccagcacttttggaggctgaggcgggtggatcacgaggccaggagttcgagaccagcctggccaacacagtgaaaccccgtctctactaaaagtacaaaaattagctgggcgtggtggcaggcgcctgtaatcccagctactctggaggctgaggcaggagcattgcttgaacctgggaggtggaggttgcagtgagctgagatcgctccactgcactccagcctgggcgacagagcgacactccgtctcaaaaaataaaataaaaataagctgtggacctaaggaatatgagaattaagagatacccttagtaccagaaatttagccaatatactcacttgctctataaaggcatctgcaatatccccaatgtctttacaaggttggcatctcaaaataccattataagacctagttttggactgagagcaagagatagatatgttaaaataacttttaagataaatttaagacaacttcaagacaaattttaagagattaattgagcaaacattttttttttttccccagagatggagtctcgctctgtcgcccgggctggagtgcagtggtgcaatctcggctcactgcaacctccacctcctgggttcaagcagttgtcctgtctcagccttcctagtagctgggactacaggcacatgccaccatattggtcaggctagtctcgaactcttgacctcaggtgatccacctgcctcaccctcccaaagtgctaggattacaggtgtgagtcaccatgcccagccgagcaagtaattttttatgagtcaggactacccctatcttcaccccttgccccagccagaatagattcagtctgccgctagtgctgctgcatggttggagaggatttatggacagaaaaaggaaagtaatgtacaggaaacagaagcgaggtacagaaatagccgattggttacagcttggcatttgtcttatttgaacatggtttgaagatttggcaacatgtgattggccaaaactttgtgattgatacaagagtatgttataatctgtttacacattgagttgggttacagttcactatatagaaaaatctctgggccgagattaaaggatatgaggagacagctttaggctaaactttatttaacagatatagaggggaagcacctggaaagatgctgtggaggagttggtgagtgggagttggaagatagagaaacaaaccaaaaatccaagttggcaaaatcacattttgaaacatctgaaaaaataaatcttatttaaaaaatctttatgtgaaaaatttaaagcttttagaagaaaaaatatatccttttgaccttggtctaaaaaagaatttatttaaaagggcacaaaaaccaaaaataataaaaggaagattaatacattgaattgcattttaaaattctatacagcaggatgcattacaaagtgaaaaaacagctacagattgagtaagatatttgtaacatatgtaatcaagtaagaattatccaaaatatgaaaaatattttttaaaaaggtaacaatccaaaagggaaatgtgaaaggatttgaataggcaattcacaaaataggaaacctgtatggttgatacatacttgaaaagatgcatccttaaacaaagaaatgcttgaaagaaggataaaaaatgttttggatggtcttacattagcaattaaatgctgtggccagaagtaacactttacttaggccctgagtgattaggatgatcagagcttgcctggtgacccataggaaatagaacacgagcaagaaataaacttctgttatttaaagccactgagattttgggattgttattgcatataatttagtttatggccgggtacggtggctcacgcctgtaatcccagcactttgggaggtcatagtgggctgatcacctgaggtcaggagtttgaaaccagcctggccaacatggtgaaaccccatttctactaaaaatacaaaaattaggcaggcgtggtggcgggtgcttgtaatcccaggtactcaggaggaatcgcttgaacctgggaggtggaggttgcagtgagccaagattgtatcactgcactccagcctgggcgacagagcaagtctccgtctcaaaaaaaaaaaaaaaaaaaaaagtaaattttggctgggtgtggtggctcatgtctgtaactccagcactttgggaggctgaggtaggaggatcactcgaggtcaggaatttgagacccacctgggcaacatagtaagatcccgtctcttcaaatatttaaaaactagctgggcgtgggtggcatgcacttgcagtcctagctactcaggagggtgaggcagaaggagtgactgagcgtgggagtttgaggcttcagtgagctatgacagtgccactgcacactagcctgggtaccaagttagaccctgtctctttaaaagtaaaataaaataaattgctctggttaccatgtagagattggattataagaggatgttgagaaaccactaaggaagtcattaaagttattcaggcgagatatgatgatactcaagactaggatggtgcattggataggacgtggtatatttagatggaatctagtgataatattgaaggcgggcttggcgaggtgtttcacacctataatgccaaaactttaggaggccgaggcgggaggatcacttgagccctagagttcgagacaaacctgccaacatagtgagacccccgtctctacagaaaatacaaaaattagccaggtgtgccaagtggtgatgtgtgcctggtacttcccagctactcaggaagctgaggtgagaggattgcttaggcccgggagattgagacctcagtgagctgagatcgcgccactgcacttcagcttgggcatcaagcaagaccctggctcaaaaaaaaaaaaaaaaaaaaaagggcaggtatattggatttagtgaacaattggatgtgttatgtatttctgcaacaaaatttttacagtaagcaaacagtgcttttgtggaccaaaaatcaaattaagtaaaaagaaaaaaaaaaaacaagaagcaagcccttaacaaggctttgttttcctctgaaccttaaaactttttcgttcctatactatcatttctctgaggtagtttgatttcttcacttcatttacatttttttccattctcacagtatttctctagttaagaattgtattatgcctctactgcaccattataggaaatactttttatggttggacattgtggctcacgcctgtaatctcagcactttgggaggccgaggtgggtggattgcttgagctcaggagtttgagaccagcttgggcaacatggccaaaccccatctctacaaaaaacacaaaaattagccaggcatggtggcacgcagctatagtcccagctattcaggaggcgaggggtgggaggatcacttgagcctgggaggtggtagttgcagtgagctgagatcatgccagtgtgctccagcctgggtgacagagtgagatcctgtcttcacaaaaataaacaaacaaacaaataaaataaataataccttttattatttacctctgatctattcctattacagttccgcattcagtgtaatttcccctaggggtaactgcaatttcatttttttaatatacccaacaaagagctgtagctccctcctgtctgcagatcagtgtttataggacagaatataatattctactatgctaactttaccttttacccttttcttagcacgtgcacacacatgtgtgcacatactgtcagagtccctatttctctctctctacacactgccagtctctctcccttgtcatactgtcagagtccctatttctctctctctacacactgccagtctctctcccttgtccccgcagtcgagtctgtctctctccttctgtttctctctctctctttctctctctcttttttttttaagagacgggcttactccatctgccaggctggagcgcaatggtgcggtcatagctcactgcatcctcaaactcctaggctcaatcagtccttccactttagcctccagagtagctaggaccacaggtgcatgccaccacaccctggctaattttaaaaaagttttttttttggtagagatgggtcctcgctgtgttgccagactggtcctgaactcctgggctgaagcgatcctgcctgctcagcctcccaaagtgttgggattccaggtgtgagccactgcctccagcctttctcttacacatgtgtacacacgcatactgtcttatagtccatgaaaatggaaagatttattccaatggttctgttcttaatattctcaaatgcctttatatctcttgatatcttggcattttcaggttcatcacaaattctccatctttccacatatatctaactgtaagcctttgcatgtgcccatagtgttactggaaaggggtcttgatccagaccccaagagagggttcttgcaccttgtaagaaagattttggggtgggtccacagagtaaagcaaaagcaagtttaagaaagtaaagtattttgtgtgacttcagggcctatactagttccatttggccccataaatatctctagaatctattcctttcttgttttcctctgctcctgcctttatcagttctctccttgtattattgcagtaggtttctagatggtaaatgtccctcttttcttcttcccccaatctctttttcatactccgccagagtacttttctaaaatacaaatctattcattttattcccctgcttaaaattcttcagtggttccttgtggcctacaaaatgaagttcaaactccttatcatggcacatccatcatctggttcctgcttacattttcagcatcatttcctactactactccccctttcccactctgcattccagtaacactgaactatttatggttactggaacttaacacgttcttgctaagcttttgcttatgatacgtcccttgcttggaatttccttctctcctggtctgctttttgaatctttacttatctatgacagtttagctcaagttatatttctgtgatgctgatattttaaaatattccttgatattccctagagagattgggcagtatattagtctgcttgggctgtgtattagtccattttcacactgctataaagaacttccttgagactgagtaatttataaaggaaagaggtttaattgactcacagttccacatgactggggaggcctcaggaaacttacaatcgtggcagaaggggaagcaggtgccttcttcacaaggcagcaggagagagaagcatgaagtgggaacttccaaacacttgtaaaaccatcagatctcttgtgaacccactcactgtcatgagaacagcatgggggaaactgcaccatgatccagtcacctccctcccttgacacgtggggattatggggattacgatttgagatgagatttgggtggggacacagagccaatccatatcaggttgcagtaacaaaatactgtagaatatgtggcttaaacatattttcagaaacttactttcttccaatgtggaggctagaagtccaagatagggtgccagcagtcaggttctggtgagagctctgggttgccttccactgtgaaattagagagaaagaaatctctctcttataaggccatcaatgcatttggattaggaccccatccttatcatctcatttaacctaaattagtacctaaaagccctatctccaaatatagtcacactgaggggggatagggcttcattatatgaattttgggggaacacagttcagttgtagcagtatgcagtatttgttgaaagaagtgctacagtctttttgttttatgattcactgtttacatgattgtctttcccattagattacacatttcttgagagttgggattgtttactttttaaaatattcttcagactttgaatatgtggaattgttgaatatgtggagttgttgaatgggctaagttaattgcattataggatgggattaatgatgtatatttaagtaaggtagacgcctagagtaggtcttctggactgctaactttgactgacattactgatgaatcattttgacccattctttttgcctagcttgccaactggatgggtcctttggttatatatactttcattcaaagcattttataacattaacaacttggacaggcgcggtggatcacacctgtaatcccagcactttgggaagctgaggcaggtggatcacctgaggtcaggagttcaagaccagcctgaccaacatggagaaaccctatctctactaaaaatacaaaattagccaggtgtggtggcacatgcctgtaatcccagctactcaggaggctgagacaggagaattgcttgaacccgggaggcggaggttgcagtgagctgagatcacgccattgcactccagtctgggcaacaagagcgaaactctgtctccaaaaaaaaaaaaaacttgatgaacttaatctatattttaagaactctaaatgattaaaaactttagaaagaattgggatttttcacgattagaggagaccaagatatatttcctcagctgttaaacaacttcaatctgctaaaatatgctacttcattaagattttgggaaagaaattttaagtaacagtttaatgttttggtgtccatcatgtctcctttgctggagcaataatagattttgcatatattttattgtcttttgtgtagaaagcatggtataaagataaatacattagaatacaaaaattgctccctctggatgatgttaaaaataagacacatgtttttcaaggtattctgttgctgttgatgagttttgagagtaatacaaacataggtatgaattttgttaatactgcttttcagtgagcctggtcaattaaacctctttgagtctcagttttctaatctgtaaagtgatacatttatattacaatttggtttatttaaatgcattttaaaattgaaaatgtaaaacattcatttatagtcatgcaccacttaatgatgttttttggtcaacagcagacctaatgaatatatgatggtggtttgtaagattgtaatattgtatatttactgtactttttctgtgtttagatacataaatacttaacattgtgttatgttagtattgcctacaatattcagtagtatagtaacatagagtacaggtttgtaacctaggagcaatagactttataacctaggtgtgtagtaggctataccatgtaggtttgtgtaagaacactctatgatgttcatacaataacaaaatctcctaacaaggcatttctcagaacttattcccattgttaagccacaatgactgttttaaaattctaacagtacaaaagagtagccaatgaaaaactctttttttctactctagatctctaattctttttcttcatctttaaagtgaccattgttaagtttcttacgtttttccagaaatattctttttatatataaatataggtacttatatattaagtataggtatgtgtgtgcatatgtacaaatgtgtgtttggggttgccattaaaaacaataagttatgtagaataactagtatgaagcaaaacagtacagcagattttaaatgatgaatgttattaactctcttccctttctttcatcaaggcttcttaagggcttatgcagtcagaaaattcctttaagatttgttttcattttgtaatttgaaatgttaattttcagatcacaaaggttgtccatgttcacatataagcagaaaagtaattaatatctaacaccaggtaatgatttattccttgccggttatttgagatttttctttaccatgctgtttcattccattagcacagtggtatttaagtagaggtgattttgcactcaaggacatttggcaatatgtggagacattttttggttgtaacatctaggagatactgttaacatttactggatggaatctagggatgctgtaacacgtcttaccatatgtgggacagcctccacaacaaagaatcatctggcacaaaatgcaagtattactaaggttaaaaaaaccgtaagttagcataaataataatgaattaagtataagttgcagcctcgctcattctttaattatagtttgtgttgactgtttattttgtgattttattattttattattttaaaactaaaatgatcctagattagatgttatctaatatgcaacagataggtacatctgttctgtttctcagattctgatcttaaagtcattttatcatatagcattggcatttgttttgcaagtttttaccttaattaaaaataaatcaaaggcagcagaaatctgtgtgttttgttgtcgttgttgttaactaaaatgataaagggatcctcagctgttaaatctactttgttgttttgaggtttgacctggccttattccatatatagccatctgccagctggtaaggtggtatctagtaaggatatttaagagtgttgccttgccagatctagccgtaagcaagtcctatatctaaattaacctttgaggctgaaaatcatatagccatctgccagctggtaaggtagcatctgtctaggatgttcaagaatgttactttgctagatctagaggcaagcatgctctctgctaaatttcatctttactggacctccaggatctttaggacttgtattagtcaggattctccagataaacagaaccaataggagtaagtagataggtaggtaggtaggtaggtagatagatatatgtatagatagatacacaaggggacctcagaaagttcatggaaaatgcatattatgaaaaaactctgcatgtttttcaaaaattttttgtgccaaaataaacttgaacaggatctagtttgaggcactaaggaaggctaagacatcagtttgaaaaaagctcctatcaaagcaacatgaattctactaaaattgaagcaagaacaaacataaaatttatagtgaaactttggtagaagaatggtgaaatcattgatgctttacaaaaagtttatggggacaatgccccaaagaaatcagcagttttacaaatggataactcgttttaaaaaaggacaggacaggccgggcatgatggctcatgcctgtaatcccagcactttgggaggctgaggcgggcggatcacgaggtcaagagatcaagaccatcctggccaacatggtgtaaccccgtctctactaaaaatacaaaaattagctgggtgtggtggcgtgcgcctgtagtcccagctgctcgggaggctgagccaggagaattgcttgaacccgggaggcaaagattgcagtgagccaagatcgcacgactacactccagcctggcgacagagcgagactctgtctcaaaaaataaataaataaaaaaggacaggacagtgttaaagatgaagcttgcagtggcagactgcaaggaaatttgcaaggaaaaaattaaccttgtttgtgccttatttgaaggggacaaatgattaacagcaaaaacaatagcgaacatcacagacatctcaagtgattcagcttacacaattctggctgaaaaattaaacttgggcaaactttcatctcattgggggccaaaaccattgcacccaaatcagctatagacgagcagtgctttcaatggaatttttaaacaaatgggatcaagatcctgaagcatttcttgaaaaaattaaaacagatgaaacatgtctttaccaatatatcctgaagacagggcataattaaagcaatggctaccaagaggtggaagtggtccagtcaaagcaaaatggactggtcatggcaacagttttttgggatgctcaaggtattttgcttgttggttttctggagggccaaagaatgataacatctgcttattatgagaatgttttgagaaaaccaaagctttagcagaaaaacactagggagaaatttgttaaagagtccttctccaccatgacaatgctcctgctcattcctgtcatcaaacaagggcaatttttaaagagtttcaatggaaaatcaatatagtcctgatttggctccttctgacttctttttgtttcctaatctttttgtttgtttgtttttgagatagtgtcttgctctgtcacacaggctggagtgcagtggctggcacaatcttggctcactgcaaccttgacctctggggctcaagcgagcatcctacctcagcctcccaagtagctaggactacaaggtgtgccaccatgcctggctaattttgtttattttttgtagagatgagatctcagtatgttgcccagtctgggctcaaactcatgcctggtgacacagtgagactctgtctcaaaaaaaaaaaaaaaaaaaaaaaaaaaaaatatatatatatatatatatatatatatttatttatttatttacgtctataatcccagcaatttgggagactgaggtgggcagctcacttgagcttaggagttgcagacccgcctgggcaacatggtgagaccccttctcttcaaaaaaattcaaaaataagctggataggctgggtgtggtggttcctgcctgtaatcacagcactttgggaggccaaggcaggcagatcacctgaggtcaggagtttgagatcagcctggccaagatggtgaaaccccgtctctactgaaaaaagacaaaaaaattagccaggtgtggttgtgggcatctgtagtcccagctactccggaggctaaggctggagaattgcttgaacccatgaggcagaggttgcagtgagctgagatcatgccactgcactccagcctgggcgacagagccagatcctgtctcaaaaaaaaaatacatatatatatatatatatatatatatatatatgtttttgtacagttatacagtatgttcgtgttttaagctaagtgttttattataagagtaaaaatgttaaaaacagttaaaccacaggttaaaaagtttatgaagtaaagttagagtaatctaaggttaatttattatcaaggaaataaaaaacaaaagtaatgttgtctaagtatagtgtttatgaagtctacagtagggtacagtaatgtcctaggccttcacattcacttaccgctcacacactgacctagagcaagttctagtcctacaagctccattcatggtaagtgccctatacaggtataccatattttatctttcatactgtatttttgctctactttttctgtgtttagatacacagatactattgtgttgcagcaacctacagtattcagtggaatagctatacaactatcctatagtctagaagtaataggctatatcatatagcctaggtatgtaataggctatgtcatccaggtttctctaagtacactctatgatattcatacgatgaagtcacctaacaacaaatttctcagaacatatttctgtcattaagccacacatgactgccttaagtattgttccatgaaatttttattttagttttatgtttacctttgcatttggtcatgattcaaaaaagcatttcttatactatgtttctttctatactaagttaactataaaatggtacatcactggtaatagtgataataaaccggccattttcatgaaaacttagttttatcttggctaggcacagtggcttacgcctataatcccagcactttgggaggctgaggcgggtgaatcccttgagcccagagttagagaccagcctgggcaacatggtgaaaccccgtctctacaaaaaaattagttgggcatgatagcctgcgcctgtggtcccagctacttgggggcctgaggtgggaggatcacctgagcctaggtgattgaggctgcagtgagccctgattgtgctaccgcactccagcctgatggatagagtgagaccctgtctcaagaaaaaaaaacaacaacagcagcaacaaaaaaacccacaaaaacaaaagccgaaaagaaaaggaaacttagttttatcttgacaaagatatctaatttgcttctaagctttttaaattgaaacaatgcatggcctatcttttgaatttgtgagtttgccacccctgaaaacatctaagtagatcatctgtcagagatgttacaggtaggatgaattcctgctttattatggaaaatttgacttctagttctttccaagtaatattttataattctaacttatatatgtggtcctattcctagaaaatgatgtattcttttcatacagtttttccagtggtactgaaaataacctcagcccgaattggctttgttaaacttggaagtttttcaagaaacatgactctagaattctttactaggtcttcgcaaaatatttcgccttgcagtaagaattgtgttcctctcatatctctttttttccttatttccatgctttcccattttattcacatggacaatttttagtcaattagcatttattttggggcttcctcaaaaactctaaattttttttttgagatggagtctcgcttggtccgaggctggagtgcagtggcgtgatctcggctcactgcaacctctgtctcccaggttcaagcgattcttctgcctcagcctccagagtagctgggattacaggcgggcgccaccacgcccagctaatttttatatttttagtagagatggggtttcaccattttggccaggctggtcttaaactcctgacctcatgatccacccgcctctgccttccaaagtgctgggattacaggcgtgagccactgcgcccagccaaaaaactctaaatttacctctttaggaatttcaacctgaccatttgtatctcttcttatattttcagttgttgcaataaattttaactttttttatgttattttataaaattgtttccattcatatatacattttcttttttataacagctttattgggatataatctacatagcatataattcacccattaaaatgcagaattcagtgctttttagcgtatccacagagttgtgcaactgtcaccactgtcaattttagaacatttttcttacaccactaagaagtcccatgtccattagcagtaattcttcattcactccctccccaagcctctggcaaccactaatctactttctgtctcaaatttgcctgttctagacatatcctgtaagttgagtcgtatcatataatatatagtctttggtgactggcttctttcactcagcataatgttttcagggtccatccatgttgtaacatatatccagcacttcatttccttttattgcccaataacattctattacggatatactgcatttcctttatcctttcatcaattgatggacatgcggttgtttccactttttagttattgtgaataatgccattatgagtattaacgtacaaatttttttttgtggacatatgtttttatatctcttgcatatacccaagagtgaaattgctgggtcaggtggttaaggcgtaagagttctttttatggccaggcacagtggctcatgcctataatcccagcactttgggaggtgaaggtgggcggatcacctgaggttgggagttcgagaccaccctgaccaacatggagaaaccctgcctctactaaaaatacaaaattagccaggcatggtggcgcatgcctgtaattccagctactcaggaggctgaggcaggagaatcgcttgaacccgggaggtggaggttgcggtgagccaagatcacgccattgcactccagcctgggcaacaagagcgaaactccgtctcaaataaataaataaataaataaataaaagttctttttatattctggatactagtactttgttagttatatgacttgtaaatttttcccccattctgtgagttgtcttcactttctttatggtgtgttttgaagcacagaagttttaaattttgttgacattctatctatttttccttttgttgtgctttttggtatcacagctaagaagctattacctaatccaggatcataaaggatctacacctatgttttattctgagatatttatagatttacttattacgttttgcgtttctgatccattttcagttaatttttgcttatgatacaaggttaggggatccaactttattcttttatacatggatatctagttatcacagcatcatttattgaaaagggcaattttttccccattgaattgtcttggcacccttgtcaaaaatcagttcaccatatatataagggtttatctctgaactctcaattccattccattgatgtgcatgtctgtctttatttcagtaccacactgtgctacagtctttatttgttgctttgtattacgttttgaaatcaggaaatgtgaatcctctgactttgttcttctgtttcaagattgttttggctattctgggtcctttgcatttccatataaagcagcagcttgtcaatttctactcgaaaggcagctggtgtttgaaagagattgcattgaatatgtagataaatttggggagtattgacatcttaataaatattaagtcttataatcagtgagcatgggatgtctcttcatttgtttagataagattactttttttcagtgatgttttgccattttcattgtgtaaatcttgcacttcttctgttacatttattcctaataattttgttcttttgatgctattatgaatgggctcattttcttaatttcgcatttggattgctcattgctagtgtacagaaatacaattgatttttatatattgatgtattctgcaatgttgttgaacttttattagctctagtaatttttttgtaggttccttaggatttgcttatatacaagcaaatttggattttgtagattccttaggatttgtttatatgcaaatcctaaggaacctacaaaaaattactagagctaataaaagttcaacaacattgcagaatacaagaccatgccatcttcaaacagagatgacttgacttcttcctttctaatctgtatgtctttttatttcattgttctttttctttcttctttatttttactttttgtctcctttccctggctaggggaatctccagtacaagtttggataggtttggggaagccaacatttttgtctcgttcctgatcttcgaaggaaagtttttagtttttcaccattaagtatgctgttagttgtgggtttttcttttttcttttttctttttttttagtatttattgataattcttgggtgtttctcggagagggggatttggcagggtcataggacaatagtggagggaaggtcagcagataaacatgtgaacaagggtctctggttttcctaggcagaggaccctgcggccttccgcagtgtttgtgtccctgggtacttgagattagggagttcaagcatctgtttaacaaagcacatcttgcaccgcccttaatccatttaaccctgagtggacacagcacatgtttcagagagcagcgggttgggggtaagattatagattaacagcatcccaaggcagaagaatttttcttagtacagaacaaaatggagtctcccatgtctacttctttctacacagacacagtaacaatctgatctctctttcttttccccacatttccccctttcctattcgacaaaaccgccatcctcatcgtggcccgttctcaatgagctgttgggtacacctcccagacggggtggcggccgggcagaggggctcctcacctcccagacggggtggtggtagggcagacacactcctcagttcccagacggggtcgcggccgggcacaggcgctcctcacatcccagacggggcggcggggcagaggcgctccccacatctcagacgatgggcagccgggcagagacgctcctcacttcctagacgggatggctgccgggaagaggcgctcctcacttcccagactgggcggccaggcagaggggctcctcacatcccagatgatgggcggccaggcagagacgctcctcacttcccagacggggtggcggccgggcagaggctgcaatctcggcactttgggaggccaaggcaggcggctgggaggtggtggaggttgtagcgagccgagatcacgccactgcactccagcctgcaatcccaggcactcggcaggctgaggcaggagaattcaggcagggaggttgcagtgagccgagatggtggcagtacagtccagccttggcttggcatcagagggagaccggggagaccggggagaccggggagactggggagagggagagggagagcagttgtgggtttttcatagatgcctttatcacattgagaatgatcctttctattcctaatcatgaaatggtgttgtatatttattaagacattaaatacacattgactagtatttatttgctttcccacatagaaaatattattattattgttattatttttcttggagacggagtcttgctctggtcacccaggctggagtgcagtggcacaatcttggctcactgcaacgtctccctcctgggttcaagcaaatcaccttcctcagcctcccgagtagctgggactacaggcgcatgctgccacacctggttaattttttgtattttagtggagatggggtttcactgtgttgcccagggtggtctcgaactcctgagctcaggcaatccacccacctcggcctcccaaagtgctaggattaagaaaatattcttaatactagtctttcaaagttttcttctcttattttctctcttctactttgaagggaaagcagggatcaacgtaagagtgcaataaatatcttttttgaaattctaaacactaaggttgaattgtcactaatttactttatttaaaaatcataaaggctgggtgcggtggctcacgcctgtaatcccagcactttgggaggccgaggcgggtggatcacgaggtcagcagatggagaccatcctggctaacacggtgaaaccccgtctctactaaaaaaaaaaaacaacaaaaaacaaaaattagccgggcgtggtggcgggtgcctgtagtcccaactactcaagaggctgaagcaggagaatggcgtgaacccgggaggtggagcttgcagtgagccgagattgcgccactgcactccagcctgggcgacagagcaagactccgtctcaaaaaaaaaaaaaaaaaaaaaaattataaaatgtggccaggcgtggtggctcacgcctgtaatcccagcactttgggaggccgaggtgggcgatcacctgaggtcaggagttcgagaccagtctggccaacatggtgaaaccccatctctaccaaaaatacaaaaattatctgggcatggtggcaggtgccagtaatcccagctactcgggaggctgaggcaggagaatcgcttgaacccaggaggcggaggttgcagtgagccgagatcacgccattgcactccagcctgggggacaagagcgagactttgtctctcaaaaaaaaaaaaattataaaatgcattgaaagtgggataatggaaatgttttcttgggggagtcacgtacttcatctgggttaacctgttacagagggagttagtctaagtgaatcttaaaattgttatcctcaaatttcagtgatcttttactttatagcttgtatgcttctatggtcccccagcaagaaatcttgtactcattagcagttattcccagttcttttccacacacactcccctatcccagctgtaggtaagtactagtttactttctgtttcagtatcttcacctattttgggtgtcttatataaattgaaatctataaattgtagtcttttgtgattaacttcatggttcatccatgttttagcgtatatcggtacttcctttctttttttttaaactatggcaaatcatataataaaattcactttcccaacaattttcaagtatatagtacaatattgccaacaacatgcacattgttatgcaacagatgcccaggatccccctatcctgcatggctgaaagtctacatccaccaaacacaacttcctacttcaccctccctctagctcctggcaacaaaccaccatttgactttctgtttctgtgagtttcactgctttagatgctttatataagtatgcattatttcatcttttgtgactggtacacttctcttagcataatgtcctcaaggttcatccttgttgtagcatatgacaggatttacttctttttaaaagactgaataatattctcttgtatgtatataccatattttgtttatctgttcatctgttgatgtacatttaagttgcttccacctcttgcctattgtgaataataatgcagtgaacatgtgtactgtggactgaattgtgttctcctcaaattcatatattgaaaccctaactcccagtgtgactgggtttgtagataaggcctgtaaggaggtgatgataaaggttaaataagataaggttggggcctaatccaatagggctggttcctttataagaagaggaagacaccagatcttttttctacactgtgggaagacacagcaacaacatggccatctgtaagccacgaagagagctctcaccaggaactgatggatagcacctggatcttggactgctcagataggtttatacgatctagtctgtggtattcagtagcccaagctgactaatataatggctgtgtgtgtacaaatagcttttcaagattttttacaattcttttatacagtgggaaaactgtattctatttatacccagaaatagaattgctagaacatgtagtagttctatttttaattttttgaggaacttccatattgttttccatagcggctgcaccatttttcattcccaccaacagtgtacaagggtcaaggattccaatttctttatatattcaccaacacttactttctgcctctgtctctctttctctctctctctttctttcctttctttctctctctctttctgtctctctctttctctctttctttcttctttttttttcaagacggagtcttggtctgtcacccaggctggagtgcagtggcgcgatctcggctgactacaacctccacctccctggttcaagcgattctcctgcatcagcctcccaagtagctgggattacaggcatgtgccacaatgcccagctaattgttttatttttatttttatttttggtagagactattggtctttgcccactaaattggaagatatattaccttgtaattgccttcagagcagggttttcctcctttagctcattgacatcttgtaccagataattttttttccagataatttctgtgtgtgtatatggaggagccatatgtgcattgtaagattttgccagcatccttgacaaatgttggtggtactaccgactaataacatagtggtacaaatgttagtggtactaccgacaaatgttagtggtactaccaccggttgtagtgacaaccaaaaatgtctccagacatctccaaatatcccctggggcgtaaaactgcatatcattgagaactttatggccctaaagaaagagatacagttttattctctgctcgctttcttttctgttagtcttgattatttgtcatttacaatatttaaccttgctcagcaaaattttaacctttcaaataaaagaagtaggttactgctttaaattattgctaaataattctcagggcaggtttttctaagtgaatttgaacttagaaacatagaatagagatggatgaaagtatcctcattttatttgtttttttataagaaaatttatttttgaaataatttggggcacatgtgcttgtgaagaaatccgtagatattgagagagatgaagtgttaaagatagtttaattcaacaaatttctaaaaaaataacaaaacctagagaaattatgtaatttgttttttgtgttggtgttggtgtatatagttacatcaaaaattttaaagactttagttagatgtgttctacatgtggaacacttttgtgttgaaatgttttgtggaggtcactagtgatttttagaacactatacatgtactaaaatgttctatgtaatattggatggaatgatccattgttttatttacccttctttttctctagaacttaactctacatttggaagtagtgtatcttacattttttaatttttaataacaaagccaaataatcttctcagtgaattagaaacttatttatttattttttgagatggagtttcacccttgtttcccaggctgaagtgcaatggcacgatctgagctcactgcatcctccgcctcccgggttcaagcaattctcgtgcctcagcctcccaagtagctgggattacaggcatgcgccaccatgcctggctaattttgtatttttagtagaggtggcgtttcaccatattggtcaggctggtctcgaactcccgacatcaggtgatccacctgccttggcctcccaaagtgctcggattacgggtgtgagccaacacacctggcctagacattttttaaagtgtagtaaatatgtgacatactggcaatgttgcatcaccatatacttgaaaatgctatccagatgcttttttgtataggagtcccacaagatatgcaaacatttttatttatttatttatatttgtatttatttatatatttaagacagagtctcccccatcacccaggctggagtgcagttgggtgatcacagctcactgtagcctcaacctcccagtctcaagccatcctcctgtctcagcttcccaagtacctgagactacagatgtgtgccaacatgcctggctaattttttaatattttgtagagacagggtttcaccatgttgcccaagctgatctcaaactcctgggctcaagcagtccaaccatctcagcctcccaaagtgctgggattacaggggtgagccactgcacctggcctatttttagttttttgaggaacctccaaaccattctctgtagtagttttattaatttacattcccaccaacagtgtataagggttcccttttctccagacccttgcagcatttgttattgcctgtcttttgccatgttgccagggttggtctcaaactcctgggctcaagtgatcctcccgccttggcctcctaaagtgttgcaattgcaggcataagccaccatgcctagccctacaaacataattttttttttttttttttttgagacgggagtcttgctctgtcgcccaggctggagtgcagtggcacaatctcggctcactgcaacttccgcctcctaggttcatgccattctcctgcctcagcctcccgagtagctgagactacaggcgcccgccaacacacctggctaattttttgtatttttagtagagatggggtttcaccgtgttagccaggatggtcttgatctcccgacctcgtgatctgcccatcttggcctcccaaagtgctaggattacaggcataagtcactgcgcccggccacaaacaattttatacaaagaatttgaaatttgaaaattaacacaggctgggcgtggtggctcacgcctgtaatcccggcactttgggaggctgaggtgggcggatcccctgaggttgggagttcaagaccagcctgacaacatggagaaaccctgtctctactaaaaacacaaaattagctgggcatggtggcgcatgcctgtaatcccagctacttgggaggctgaggcaggagaatgcttgaacctgggaggcagaagttgtggtgagccaagattgcgccattgcactccagctggggcaacaagagcgaaactccgtctcaaaaaaaaaagaaagaaaattatacattgttgaaataattttatttcattagatatgcataataatttttagctctacaattttatgttcgcttgtgtttttgagtctgtaaatcataatgatgggcctattgggcattcatttcaatatagtattagtgtaacagagcaaagagtatatgaatactcatgatcctaccacatttggggatatagtctgtagaccctttttgtgcccatgtgcacacactcacatacatttttttttttttgaaacagagtcttgctctgttgctcaggctggagtgcagtggtgccatctcagctcactgagcctctacctcccaggttcaagtgattcttccgcctcagcctcctgagtatctgggatcacaggcatgtacctaccacgccctgctaatttgtgtatttttagtagagacagggtttcaccacgttggccaggctggtctcaaactcccgacctcaggatccactcactgcgacctcccaaagtgctgggattacaggtgtgaaccactgcacctagccataaatttttaaaaatgcagttacattatgctggtgtttaatacggtctttcccctctaaaaatagattgtagattggctggatgtggtggctcacacctgtaatcccagcactttgggaggccgaggtgggcggatcatgaggtcaagagtttgagaccagcctggccaacatagtgaaaccctgtctctattaaaaatacaaaaaaattagctggacatggtggcagatgcctgtaatcccagctacttgggaggctgatgcaaggagaatcacttgaacctgggaggtggaggttgcagtgatccaagatttcgccactacccttgagcctgggcgatgctgtgagactctgtcaacaaatcacatctaaacaatttttcatgactgcatagtattttattttggggtatagtatgattttgacaacctaaatatatctatagagaactgattactggccgggtgcagtggctcacgcctgtaaatcccaacactgtgggagcctgaggtgggaggaatccttgaactagcttgtgcaagagggcgagaccccatctctacaaaatgtgttttaaaatactagacaggcatggcggcatgtgcctatagtccagctactcgggaggctgagctgggaggatcccttgagcccatgagtttgaagctgcagtgagctgtgattgcaccattgcactccagcttgggtgacagagcaagaccctgtctcacatacacaagaagagagaaatgattaccagtgtttgctattacaaataatgttctagtaagtaagtacacttatacatatttgtatttttttaatataaaaatttgaaagggaatgtggagtcttaggaagatccatatttaaaattgttattttatgatgctctccaggcaggttatagaaaattatgtaggttaagaatgtttctaggatattcaaaatttagtcctcttttaagagtaggtaatgaggatggccacccattgcaacatgggttgaaaaaatagagtcatccaaaaccatctcatggaattcttatttatttgtttatgggtttatgacttatatttacaccattagaatataacaccttaagggtaggtgggcactgtcttattcccagcatttttcctggtttagaatactgccgggcacataacccacacctaataataagtatttgacttttttttttgagacagagtgttggccaggcgcggtggctcaagcctctaatcccagcactttgggaggccgaggcgggcggatcatgaggtcaggatatcaagaccatcctggctaacatggtgaaaccccgtctcttctacaaatacaaaaaaaattagccgggcatggtggctggcgtagtcccagctactcgggaggctgaggcaggagaatggcgtgaacccgggaggcggagcttgcagtgagccgagattgtgccactgcactccagcctgggcgacagaaggagactccgtctcaaaaaaaaaataaaaataaaaaataaaaaaaaaaaagtgttgctctgtcgcccaggctggagtgcaatgacttggtcttggctcactgcagcctcctcctcccgggttcaagcagttctcctgcatcagcttcccgagtagctggaactacaggcacgtgccaccatgcctggctaattttttgtatttttattagagacggggtttcgacatgttagccaggatggtctcgatctcctgaccccatgatccgcctgcctcggcctcccaaagtgctgagattacaggcatgagccaccgcgcccggcctctttaatgactgatttttgtgtagactccaggatatataagcctcttagaggtttaagcgtggcttatgtgcttttctgtggtttagctgttggctctgaattaggagagaacaatatatcttattgctgtttgggaaagcttggattattttgtcagtttagaattggtgtgtgtgtgtgtgtgtgtgtgtgtgtgtgtgtgtgtattttttgttttaatcagcttttgcttgtctttctctttaggtgtacagaaaagagttaaaatagcaggcctggggtgggggtggcagctcacacctgtaatcccagcactttgggaggccaaggcaggcgaggtcgggagttcgagaccagcctgaccaacatggagaaaccctgtctctactaaaaatacagaattagccgggcatggtggcacatgcctgtaatctcggttactcaggaggctgaggcaggagaatcgcttgaaaccgggaggtggaggttgcagtgagccaagattgcgctgttacactccagcctggtcaacaagagcgaaactccatctcaaataaataaataaataaataaataaataaataaataaataataaaaaaataacagacctgagactgctatctttagaatggcctgcttgcaacttggcccttagctggcatttaggaatttagattttgggagtgttcccaccatccccaaaccgatatgagtggtttactatgcctaaagtgtttgtgcaaacagtgtggaaatatgctttatattgaatgcctccctttcttctgggaatttggatacctgctaggctaagtatgcctctgtgacccatgacccaataaaaactttggacactgagtctctaatgagcttccttggttaaacaacatttcacacgttttgtcacaattcactgctagaggaattaaatgcaccctatgtaactccacggaactgatggaagtttacacctggttttctcctgactttgattcatgtcttttcctgttgctgagtttggtttgtattattttgctgtaatatattatagccttgaggctgggtgcggtggctcacgcctgtaatcccaacactttgggattacacccagatgaggtgggtggattgcctgaggtcaggagttcgagaccagtctggcccacgtggtgaatccccatctctactaaaaatacaaaaaaaaaatagccaggcttgatggcatgcacgtgtgatcccagcaatctggggggctgaggcaggggaattgcttgacctagggaggtggaggttgcagtgagccaagatggcaccactgcactccagcctgggcaacagagcgagactccgtctcaaaaaacaacaacaagaacaacaacaaaaaaagcattatagccttgagtacgactttgtgctgaattctgtgggtctcagggatccccaacacaacatcaaatttgagaacatcctgagcaggtaggtaccttatgaagattttgatctctttcctactatgatctttctctgacatcatgagaatgctcagcaaaatgataatttaatctgttgtattctagatacagaaatatgtaaattaagggatgaatattttatttttgaaaggattatttgctttacaaaagatttcaccatgggctgggcgaggtggctcatgcttgtaatcccagcactttgggaggccgaggcaggtggatcacctgaggttgggaggttgagaccagcctgaccaacatggagaaaccctgtctctactaaaaatacaaaattagccgggcatggtggcgcatgcctataatcccagctacttgggaggctgaggcaggagaatcgtttgaacctgggaggcggaggttgcagtgagcccagatcatgccattgcacttcagcctgggcaacaaaagtgaaactccatctcaaaaaaaaaaaaaaaaaaaaagatttcaccataagattgggaaaatagaggactcttgcttgatttatatacttaaatttagaaatttgagtttacactaaattttatagggacaattatgttagattaagatactctgtttttcatatatttcataacagaatttgtgatactctgaaatcccagttgtatttgtcttgagaagtttgtgttctgggaaaggaatactgttgcttcagctatttagttatttgccccattactgcaaggttcctgtgttgtttattttagatagttcattttgacatttagataaaccaaagccaaacacacaagcatgcccagaattagtccctgaacttcattccagggtaaagataagacatttagacttctccagtacagataaatatattacaactactgaaaaatgggtgttatgtgactcttgtatttttagatacagaatgacagtgaaggtcttaaaaaatttctatcagttaaacttatgggaaaatttatattcacttatagatcctacttttcaattataggttatgcctaggattctgtgactcaataacaccttttaataacacgaatgaaaaatatttaaattcccctgaactatatgttgtcctattcagctctatattgtgtcttgcctttgaaaaaatggacttcattgaggtataaactgcatctatttaaaactgtacaattccagccggacacagtggcccacgcctgtaatcccagcactttgggaggccgagacgggaggatcacctgaggttaggagttcgagaccagcctggccaacatggcaaaaccccgtctctactaaaaatacaaaaattagccgggtgtggtggcaggtgcctgtaatcccagctactcgggtggctgaggcaggagaattgcatgaacccaggaggcagaggttgcagtgagccgagatcgtgccattgcactccagcctgggggacaagaacgagactctgtctcaaaacaacaacaaaaaactacaatttgatgagtttttgttttgttttttgttgttgttgttgtttttgagacagagtttcacccttgttgcccaggctggagtgcaatggcatgatctcagctcaccacaaccaccatctcccaggttcaagcgattctcctgtctcagcctcctgagtagctgggattacagtcatgagccaccactcctggctaaattttttgtgtgtttttagtagagatgcggtttctccatgttggtcaggctagtctcaacctcccgaccttaggtgatccgcctgcctcagtctccccaagtgctgggattacagtcgtgagccactgcgcctggccaattcggtgagtttttataattgtataatagtcatgaaactccccaccatactcaacatacagtacatttttatcatcccccaaagattccttatgcccctttgtattctgtttgccccttgcccttagcaccaggcaatgactgatctgctttagattactttgtattctctaggatttcatatgaatggaatctatatgcacttgtgtgtgatgtcttttgctctgaacaatgtttttgatatttatccatattgttacataatctattccttttattgctgagtagtaacttatatggatgtatcacattttgttgatcaccaatttatgaacagttgtttacgtattgtaaataaattgctattgtatgagtttttgtgtgatatatgatttcattttcctgttttgtttttggttttcattaataaaaaagattggttctagtagtcaggcattgtggcttgtgcctatagtcccaactatccagagaccaaggcaggaggatcacttgagcccaggagttcaagtccagcctgggcaacatagcaagaccctgtctcttaaaataattggttctaatagttcttgttagtggcaaaaattaggggaaagaagtacatcaataatttacttattcaataaatacttgttgaatgccaagtataatgccatgtgcttaaaacacaatggtgaacaaggactcagcccctgctcttattttagcttatactttaatgaacaagctaagcacatttacaagtagtaagaattatggggattgtgtgcataagtatagaatgttatggaagtatgtgataggggatcccgcctcagtggtctggggtaattagagtaggagtcttcagagaaatgtttaagaggaacagaaagtaaataaatgaggcactccaggtaaagagaacagaatgcatgaaggccttgatgtgaaaaagagaatggtactttatgtgtgctatctggatgaagctggagggatttggagtttctagattatgtaggtccttgtacaacatcttaaggattttggaaattttcctgaagatggtaggaaatcactaaaatgtttcaagcaaggacgtgacgtgatcaaattgtggatcttatcattgcagtttaatatatactgtcttttttttttttgagtaaattatttatagtcccttcattatcagaaattctgcccattatttaaaattctattacttttaataataatttttagtaatactaagtatatacccaaaaggaaggaaatcagtatatcaaagagatgtttgcactcccctgtttacttcaccattgttcacaatagccaagatttggaagcaacctaagtggccatcaacaggtgaatgaataaagaaaatgtggtacatatacacaatggagtactattcaaccataaaaaagaatgagattctgttatttgcaacaacatggattggaggacattatgttaagtgaaataagctaggcacagaaagacaaattttgcatgttcttacttgtttgtgggagctcaaaattaaaacaattgaactcatggagatacagagtagaaagatggttatcagaggctgagaagaatagtggcagagggggtaaggacagggcagaagtggggatggttaatgggtacaaaagtataattagatggaatgaataagatctaatatttgatagcacaaggtgactacagtcaacaataatttattgtacattaaaaataactaatagagtataattggattgtttgtaatacaaagaataaatgcttaaggggatgcatatgccatttaccctgatgtgattgttaactcattgcatgtctgtatcagaatatttcatttacctcatatatacctactatgtacccacaaaaataaaaaaattttttgtaagagatgctatcaagaaggtgagtaaaatattgcagtaagactaggaccactccccattttattattttatttctgaataagtaaaaaaatttatttttaatttttgtttttgagacagggtctcactgtcacccaagctggagtgcagtggcgtgaacttgggttactgcaatcaccacctcccgggctcaagtgatcctcccaccccagcctcccaagtagctgggactacaggcacacaccaccacacctggctaattttttgtatttttggtagagatagggttttgccacgttgcccaggctggtctcaaactcttgagctcaagcgatccgcccaccttggcctcccaaagtgctgagattactggggtgagccactgcacccagccctgaatatgtagaatttaaatatgcagatgctactggaatactaaagttttaaattcccatttatgtaagagaaggctacttgctggaagtaaatcggggataaagccaagaggcctggtatttgattttcggtaacagtctataaccaagtaacttacctactaacttatctagttacttgttacttgttatctagtaacttgttacgttattgagcactcatttatagtacttgctctgagtctgtgaggaggaagtctttaggagaagcagggattatcagaacaatttacagttgtgctttaatggacaaaaccaaaacatgattacaatttgacaattttgtttatatatagtgcttagtatatttatataaactctctagagctgcactatctaaaatagcactagagacacgtggttatattagttggcttggactgccacaacaaaatacaatagactcgatgtcttgaaacaacagcaatttattttttcacagctctggaagctgggaagtccaagatcaaggtgctagatgacttggatccctggtaagggctctattcctggcttgcagatggccaccttctctctgtgtcctcacatagcacagagagaggaagcaagctctgcagtgtctgttcctatagggtactaatcctatctcatgacgtccttgaaacctagttacctccagaggctccatgtccaaataacatcacattgtgggttagggtttcagtaagtgaatttgagggggacacaattttaagtcttacagcagtggctatttaaatttacattgcaattaattgaaattaaaacaatactaaaaattcagttcctcagtcacactaaccgtatttcaagtgcttaatatccaaataaggtgactgagagtgatggttcacacctgtaatcccagcactttgggaggccaagttaggaggattggttgagcccaggaaattgagaccagactgggcaacatagccagaccccatctctatctaaaaaataaaaataaaaaaatatgactactggttactgtattagacaatgtagattatagaatatttccattttcacagaaaattatattggatggtgctgatatatagtatatggaagtctgtcatgatagctattgatacacaaaagacgttagtcttattttgagtgagatacaatgctgtgattgtgtcttacttgaagtctgctttcctcagtaaaaatccattataatgaactcctttaagaagtggagagttttttgtttgtggggagtgattagttttattttaaagtgttttttggcccaaaatggttagttttattttaaagtgtttttggattattttcatggtatgttcttttgtgtactttttatcttaaaattaaagtagtattgccaggggcggtggctcacgcctgtaatcccagcactttgggaggccaaggtgggcagatcatgaggtcaggagatcgagaccattctggctaacacagtgaaaccccgtctctactaaaaatacaaaaaattatctgggtgtggtggtgggcgcctgtagtcccagctacttgggaggctgaggcaggagaatggtgtgaaccggggaggcagagcttgcagtgagccgagattgcgccactgtactccaaactgggcaacagggtgagacccgtctcaaaaaaaaaaaaaaaaaaaaaaaaaaaaaaaaaaaaaaagttaagtagtattgctaattacctgtttcagatctcatcacaaaggacactatgtttttttgtttgtttgtttgtttttgtttttttgagatgaagtcttgccgtgtcgcccaggctggagtgcaatggctcaatctcggctcactgcaacctccgcctcccgagttcaaatgattcgcctgcctcagcctcccaacttgctgggattacaggcgcccaccaccacgcccagctgcccagctaagttttgtacttttagtagcgatggggtttcaccatgttggtcaggctggtcttaaactcctgacctcatgatccgcccatctcgaccttccaaactgctgggattacaggcgcgaatcactgcgcccgaccgattggttctatttatgtagcacttttctttctttctttcttttttttttttttccagagggagtctcgctctgtcgcctaggctggagtacagtggcacgatctcagctcactgcaacctctgcctcctgagttcaagcaattcttctgcctcagcctcccaagtagctgggactataggcgtgtgccaccacacccggctaatttttgtatttttagaagagacggggtttcaccatattggtcaggctggtcttgaactcctgacctcaggtaattcaccagcctcggcctcctaaagtgctgggattacaggtatgagccactgtgtccagactgtatagcacttttcaaagccctttcatatatctctgctactcacagtgaacccgagtgtggagattgcatgtaaactatacagtatacatggcttcatatgtgggtgtctcttagaagacacacaatagtgtgaactctcctaataactgtatataaatgtgtaagttgaacctgtattctttccttttttcactcctttcttttttttaaagtgccttgggatttttagaaggggatatacctttccaataacccatatactattgtctgccaaattgaccatattttcaaaacagatttattatctatctacctacctacctacctatcaatcatctgtctctctattgagagacactagtattagcatctgatccaaaacaatgaatgagattaaacctcatgtaataagattttgagttagaataataaatagccttatatgtgtttgggttttgcatactgtagctgtcatatcatgtttcagttattcattgcttcagatgattaagggttttttttttgtgctcagccttaatatagctcatttatcatgaacatgatataataatttttcatgactattatctatttctagtgatttcttcatcaatatagatttataatgactttttttagaatgaaagaagaaacagaaaaatgacataaagatcaattatttttagcaagcaataatataaagatatattatttttagcaatattttatatatatatatatatatagagagagagagagagagagagagagagagagtattatagataagccattaaaatctttggaaacctatgctaatttttctgtgtcatactttcatctttttcccccaacatcatatagtagaatgagacacttctactcaaaggacaagacatagattgcaagtttgacttttttggttttttttgaaatggagttttgctctgtcacccacactggagtgcaatggtgtgatcttggctcactgcagcctccgcctctggggttcaagcgattctcctgcctcagcctcccaagtagctgagatgacaggcacacgccaccacgctcgggtaattcttgtagtttttagtagagatggggtttctccattttggccaagctggtcttgaactcctgacttcaggtgatctgcccactttggcgtcccaaagtgctgggattacaggtgtgagccaccatgcccagactttacttgtttttcaagtaaatgattggacaccttcagtttaaatgatatggtaacacatggacaattctgtatagtgatactttttgtttaaagcatttatttgccatatatataatatttaaaaaatttttgagccaggtactgtggctcactcctgcaatcccagcacttccggaggccaaggcaggaggatcacttgagtccaggagtttgtgaccagcctgggcaacatagcaagaccttgtctctgcaaaaaaaaaaaaaaaaaaaaaaaaacgcacacaaaaattagccgggcttggtggcatgtgcttgtggtcccagctactcaggagacttaggtgggaggatcccttgagcctgaaagccggaggttgcagtgagccaaggttgtgccactgcactcaagctgggcaatattactgagaccctgtctcaaaaaaaatttttttttttaaattaaatgcttaattctcttatagtctatctttgttagtgtgctcagttagaatttggcctctgctgtattctgtcaaattgtcctctttatcctttctatagctctgagtttaacagatctttagaatagatgataaccagtggtgattgtttctttaatgtgcacatttttctttattcaaaaagatggctttctttttatttgacgtgtattttttgcattctctaacccaattttcttatacatttgggacttcaatttgtatctgcctataagcaaacttacttataattacaatttttatccctgccaaatcttccctgtgtataaattggttatcattaggttctaaaaagtttttatagagttagtttgaaaagctgttcttcataattgtgtacagtttctagagttttacatttatggacctaccttgcatgcaatatcttgaagacagaaaaagtgtaggctgttctcaaaacgttggagtgagaaagtaagatgtcctgctgccaaatataaagttgtttttatactgtctctctgctgaaaatcctttttatttttctcctttaagccttcctctttgattgagtgcactctcttcttttctaaggttttcgttttttggatacttgtttaacaaactttttgtcagctaccatttggcagctcactttcacaaccctcacactcctctttttacctacttttagttgtttggcaaacatctatatttttgtacaactttggcaaaaatgatttatcaatgtagctccatacctgttgaataaaaatagtagaaattatacatcacaagaaatagaaccttattaagaattttctttacatttaacttttaagttcaggggtacatgtgcaggtttgttatatatgtaaacttgtgtcatgggggtttgttgtacagattgtttcatcacccaggtattaagcttagtatttcattagttatttttcctgatcctctccctcctcccaccctccaccctttgctggccccagtgtgtggggttcccctctatgtgtccatgtgttttcatcatttatctcccacttataattgagaacctgtggtgtttggttttctgttcctgtattagtttgctaaggataatggccccaaaaccatacaaattctggaagacagcctaggcaataccattctggacataggaacaggcaaagttttcatgacgatgccaaaagcaattgcaacaaaagcaaaagcaaaacaaaaaacaaaagcaaaacgagatttaattaaacataagagcttctgcatggcaaaagaaactatcaacagggtaaacagacaacctacagaatgggagtaaatttttgcaaactatgcaactgacaaaggtgtaataaccagcatctataaggagcttaaacaaatttacaagaagaaagcaacctcgttaaaaagtgggcaaaggaaatagatagttttcaaaagaagacatgcatatggccaacaattatatgaaaaaacggctcagtatcactgatcattagagaaatgcaaatcaaagtcacaacgatatatcatctcacactggtcaaaatggctattatcaaaaagtcaaaaaataacatatgccaggaaggttgtggagaaaaaggaacacttatacactgttggtgggagtctaaattaattcagccattttggacacatgcacgtgtatgtttgttgcagcactgttcacaataacaaagacgtagaatcaatctaaatgcctatcagtgctaatctggataaagaaaatgtggtaaatatacaccatggaatactatgcagccataaaaaagaattcttaaaggttgattctacatctgaaaattacttgaaattaaactaaaaaagcccagtgtttaaattttttggcatttgacattagaatatccatgctatggagaaaaagaaaactttaagaatattttttaaacagagaagaagaacatactgtactgatatcttgaaggatttcaagctaaactaaaaattcaatagaaaaaataaaattagtgctaaaggaagtaaagaacagacattgtagtacaaaattgaataagaggattggaagaacaccttgagaaactctcacagaagcagaggaaacaatgagaacgataaaagagaatgtgctgattttggagaccatggatccataatcatatatccataatataatatggatccatgtcatcatttccaaaaaaagacataagaaaaatgaatgaaaacagttaacagagcatacattaatattattttcctgacctgagaaaagaccaaactttttttttttttttttttaagagatagggtatcactctgttacccaggataggctacagtattgccctagtaacccagactctagggtgcagtggtgcgatagttcaccatagccctgaactcctgggctccagctatccatctgcctcagcctcccaagtagctgggactgcaggcatgcactaccatatttaaaaattttttaattccttgtggttaccttactgtgttgcccgggctggtgcaaactcctggcctcaagcagtccttctgcctcagcctcccaaagtgttgggattacaggcacaagacgctgcactcggccacaccaaactttttatattgaaagtattgattatcaaaaacacatataataaaaagagaacaggccaagtgcagtggctcatgcctgtaatcccagcactttgggaggccaaggtgggtggatcacctgaggtcaggagtttgagaccagcttggccaacatgaaacctcgtctctactaaaaatacaaaattagccgggcgtggtgatgcatgcctgtaatcccagctacttgggaggctgaggcaggagaatggcttgaacccgggagacggaggttgcagtgagtcgagatcatgccactgcactccagcctgggcagcagagcaagactccgtctcaaaaaaaaagaacaatacttagatacatgctagtatgtttgttgaataaaagaacatcaataagcatgtgtaattagtctaaccttcctaggttgttgaaaaggaactaaaatcaagcttcacctccaaaaatataatgcttataatgacctgtgcaaacagttttgaacaaaaatgataattccaggaagaaggggaagctagaaaattgagagttttaaatcagaagcagcagttcaattgagaataagaattgactggattcagttgtttagctaatgataagaaaaaaagaaaaaatgacatccctttgacattttcttagttattccacaaacatatctgcataatttatattttattgtatttttcttatctttttaaaggtaagaaatcgtaatatacttttttctttttttatcattcaatttctttttttattattattataccttaagttctagggtactgtgcacaacgtgcaggtttgttacatatgtgtgtagtatacattttctttgttgtttcccgtatgtggttggggtagcattttgaagagatggtctttccacctgcaaagctatttgtatattagaatatttaattctcctggggactggactaaaagccagtgaaaatgcttcaggcattttgacaggtaaaccaaaacaaagtaaaataccacttccacacatttccaaattcttctcccttgcatgcagtcctgccaaaattaggaaccactattttttttttttttttttgagatgaagtcttgctctgtcgcccaggctggagtgcagtggcgtggtctcagctcactgcctcccggattcaactgattctcctgcctcagccttctgagtagctgggattacaggcatgcgcctgcatgcccagctaatttttgtatttctagtggagacggggtttcaccatgttggcccggctggtctcaaactcctgacctcgtgatctgccagcctctgcctcccaaagtgctgggattacaggcgtgagccaccgtgcccaggctagtaaccactgtttatctattaatttgtactcagggtgttaatagagcacgttaattgattttttgaatattgaaccaggcttgcatatctgggataaaccaccccgtacctttttttttttttaactatactttttttttaaatgctgaactatccacaggcccttatggttttgttttttgttgttgttgttgttgtttttgttttttgagatggagctttgctctttttgcccaaactggagtgcagtggtgcgatctcagctcactgcaacctacacctcccaggttcatgtgattctcttgcctcagctcctgaatagctgggattacaggcgtacaccaccatgcccggctaattttttgtatttttagtagaaacagggtttcaccatgttagccaggctggtctcgaatgctgacatcagttgatctgcctgccttggcctcccaaagtgcctgggattacaggtgtgagccactgtgcctggccaacattggatttttcagttgtattaccagttttatgttcaaaactcctttaagaggttctatttttatgcattgtctttacttaacccaatctcttcatttataaatatgtaaatattatgtatttagaaaatatataatggtaaagtttgaaaggatgcctgagtaaccaagaacagtggtttcctggggtggaaggagggcaacatcggaatagacaaatgggaacaagggtatgagtgaagcttttcactatataatcatttataaaatggacagattgatcggctgacactaaagttcttttcagtgttctaatcctatgaatcatgtctagaatatttaaactattgataaaagaccagcatctacaaaatttttaagttttcttattattgttggttaatttcatctccagaatttagttattagttttgttcagaaacattatttaaataaatcagcctcagtgctatggtgcgtatgaattaagccatactaaaggtacacatccaaaataaagaaacaagtcagaagcccccaaggaatatattggccaagtgtattagactattattttagctaatcaaacacattaggaaagcctactgtaagaaatgaaattaaagatcagatattgctttcgataaccttttactttagtattctcagcaatgttggtaaatatttattagctgataaattatgtggcaaatgttctacaaaaattagttaaatcggattatgtgtgtggagaaagattggcattaaaagtacattaggttgtccttttaggataagtctattgagcatttctttttctggttattatattgataatttgaataacagaaagtaatttttttggtcgtgcatggtggctcacgcctgtaatcccagcacttttggaggcctagttgggtggatcatctgaagtcgagagttcgggaccagcctgaccaacatggagaaaccccatctctactaaaaatacaaaattagccgggcgtggtggcacatgcctgtaatgccagctactcaggaggctgaggcaagagaatcgcttgaacccaggaggcagaggttgcggtgaggcgagattgtgccattgcactccagcctgggcatcaagagcgaaactctgtctcaaaaaaaaaaaaaaaaaaaaaagaatttttttttattgaagtataatttatacctgaagttcactcaatttaagtgaacaattcagttattttttttgcaaatgtacacacttgtgcaatggttaccagtttaattttagaacatatatataccctaaaaagaaaccatgtacccattcatagttactctttgtatcattagtttaccatacctaattatgtatgtaactttgtataactgactataaaatatgataaaagtaagtactatgcaatttccagaattattcagccttctaggtttgttttgaagacttggtaattttgaacatggacattttctttgatgatattttttatttggacaccaaaattatttaatagaagcaagagtggtgagaataatttgagtacgaggggattgcttttgggaaatgagaattttaaaatttccttcttgtttggagtttacaaatgaattcatgaacagaagaacgtcattgaatgtaaaattagaaatttatgtaaagatttcagttcaaataatttagtagggaaatttatgaagtcattcggataagacaaagattttatataatattttgaaaacattaaataatttgtcattcctttatttcctttattttagcttcgcagaatcaagaacggctatgtgcgtttaaagatccgtatcagcaagaccttgggataggtgagagtagaatctctcatgaaaatgggacaatattatgctcgaaaggtagcacctgctatggcctttgggagaaatcaaaaggggacataaatcttgtaaaacaaggcaagtgatactttccttacctgaaatgactgtgttttatacaattgatatttatctaaaaaggacatgggagtatgttaaaatcctgttcagaaaaacagtgaatttaaaagtgtatatataaagccaggtgtggtggctcatgcctgtaattccagcacttttcgaggctgaggtgggcggatcacttgaggccaggagtttgagaccagcctgggtaataacatggtgaaaccccgtctctactaaaaatacaaaaattagtcgggtatggtggtgtgcgcctgtggtcccagctactcagtaggctgaggcaggagaatcactgaacctggaaggcagaggttgtagtgagctgagatgtcaccagtgcactccagtctgggcaacagagcaagactccatctcaaagaaaaaaaaagtgtgtgtatatctccacaagccccaaatttataaaaggctatttatttttagattatttttaaaacatctttcttataatgttatacatgcccgttctatgaattttggaatatatagagaactacaaagaaaacaaaagtctacaataatatactctttaaaaatatttttactggccgggcgtggtggctcacgcctgtaatcccagcactttgggaggccgaggcgggtggatcactaggtcaggaggtggagaccagcctggctaacacagtgaaaccccgtctctactaaaaatacagaaaattagccgggcgtggtggcgggcgcctgtagtcccagctacaggctgaggcaggagaatggcatgaagctgggaggcggagcttgcagtgagccgagatcgcaccactgcactccagcctgggcgacagagcgagactccgtctcaaaaaaaaaaaaattaggaacatactgtataaacaatttcatatccagttttctccaccttaattataagcatttttccatgtctttaaagaatctctgaaaacctttttaacttttgcacaacatatcattgtatatatgtatcatagtttacttacagattattctattggtagacattatgttattttcatgttttcactgtaatgcatagtgaaacacagttgttcagtgaacaactttaaacataattttttgattgtatgtgattgtttcttgaaatagatcccttgatgtagaattattaggttataagatatatcaatattttaaagactgtataaaaatttccatgtggctttctaaaagtactgttcatttatattctctccaacactgtatgaacgtgtctgtgttactgaatcatttttctttttttatttttattttttgagatggagtctcgctctgttacccaggctggagtgcaatggtgggatctcggctcactgcaacctccgcctcccgggttcaagcgattctcctgcctcagcctgccaagtagctgggactacaggtgcgcaccaccacgcccagctaatttttgtattcttagtggagatagagttttgccatgttggccagggtggtctcgatctcctgaccctcatgatccgcccacttcggcctcccaaagtgctgggattacacgtgtgagccaccgtgcccagccatttttctgatatatattatttatttatttgttattgtatttttgagacagaatgtcactctgtcgctcaggatagagtgcagtggcacattcatggctcactgcaaccttgacctcctgggctcaagcaatccccccaagtcagtaggaccacaactaggcaccaccattcccagctaatttttaagtgtttgtagagatgtggtatggctgcgttgcccaggcaggtctcaaattcctgggctcaagtgatcctcctgctttggcttcccaacgtgctgggattctaggcgtgagccaccgtgcccagccatattattttttaaacctaaaacaatatatttggtatagacaaaaatgaaaccttactcttgctttaataattcttcgattagctgggtgcagtggctcacacctgtaatcccagcactttgggaggccgaggcaggcagatcacctgagctcaggagtttgagaccggcctgaccaacatggagaaaccccatctctactaaaaatacaaaattagccgggcatggtggtggcacatgcctgtaatcccagctactcgggaggctaaggtaggagaatcgcttgaacccgggaggtggagattgcagtgagctgagatcgtgccattgcactctagcctgggcaacaagagtgaaactccgcctcaataaataaataaataattcttagattaatcatgcagttaaaccttttttggtggccttttcccccccatgaaatgtctttggtatcctttaccatttttctgtttcttaaaaatatgtttcctgttgatttgcaaaactgtttcatagcttacacgtactctcacatttattgaaattactgcttagtttgttgtttttctcttagttttctttatcatattgtctccttttttgtattcatattgatttataggatgttggtctcacattggagatccccaagagtgtcactatgaagaatgtgtagtaactaccactcctccctcaattcagaatggaacataccgtttctgctgttgtagcacagatttatgtaatgtcaactttactgagaattttccacctcctgacacaacaccactcagtaagtaaagtaaccaacttttctttgtatttcctttctccaaagatttgcaaaatataaaaaaacttaaaaaacattcaaggttgaagccaggcgtgatggctcatgcctgtaatgccagcactttgggaggccgaggtggatggatcacctgaggtcagagtttgagaccagcctggtgaaatcccgtctctgccaaaagtaaaaaattagccgggcgtagtggtaggcgcctgtaatcccgctactcaggaggctgagacaggagaattgattgaacccgggaggcagaggttgcagtgagccaagattgcaccattgcactccagcctgggcaacaagagtgaacctaaaagaaaaaaaaaattcaaagttgttgggagtgagaggtagagttccagcatcataagattacatctggcaaacacctgaaatccgaaagcgatgcaccaggacttccaaggcatcaatatattactaaataactttggtaaaatatagtactggccaggcacagtggctcatgcctgtaatttcagcactttaggaggccagagcaggaggagcacttgagcccaggaactgaagaccagcctgggcaacatagtgagatcccatctctaccaaaacaataaataaattagccaggcgtggtggtgcgcatgtgtagttcagctatttgggaggctgaggttggagatttgcttgagcctaggaagttgaagctgcagctattgtgccactgccctctaacctaggtgacacagcgagactctgtctcaaaataaaataaaatgtagtactttacaacctgtatggagggaaatttggttaagacaactacatgtgtgcttactctttcacctagctttcatatttcttggaatttatctggaagatacatcttcaatagtacgaatatacatagacattgagttgtttactgcagtgttatttgtaactgcacaatattaggaagtaaatgtccaagaataggagattagttgaaatatactatggtacatacatgtaatggagtaccaactatacagctataagaaaaaaataagatctctatgaactagcacagagtgattttcaccggtaatattagatgcaaaaagtacatatagtaggctgtcttgtataggactggaaggaaaataaaaaagcctatctattattgacttacctttaaaaaaagaaacaaagaataaatagaaaataatgaacttggttatttataagggatccaaggaatgagacagaaagaatatggaagggagtgaatgttctctgagtgtagctttttttttggtttttgtttattttttggttttgttttgttttgtttttttgagatggagtttcgctcttgttgccgaggctggagtgcaatggcacgatctcggctcaccacaacctctgcctcccaggttcaagcgattctcctgcctcagcctccctagtagctgggatcaggcatgtgccaccacgcccggctaattttgtatttttagtagagacggggtttctccatgttggtcaggctggtctcgaagtcccgacctcaggtgatccacctgcctcagcctcccaaagtgctgggattacaggtgtgagccaccgtactcggcctgagtgtagctttttgtatgtagtttttactgttggcatcgtgtcactattctacgtaagcaaacaaaattaagtacctaacaatggaaaggagaaaaattcttcacagtatacgcaaactgaaataaatgaacccaattttatttttattttatttatttatttttttgagacagaatcttgcttttgtcaccctggctagagtacagtggcacgatcccggctcactgcaacgtccacctcccaggttcaagtgatctcctgtctcagcctcccaagtagccaggataacaggtgtctgccaccacacccagctaattgttgtatatttagtagagatggggtttcgctatgttggccaggctggtctcaaattcccgacctcagatggatgatccgcccacctcggcctcccaaagtgctgagactacaggcctgagccaccgcgcccggccccaattgtatttcatattactataataactaccctgataccaaagttattgaaagataagggggggaaaaaaagccctgaagagaaaaagaactaattcaagtgatttataagcacagtatttgactatatacactcttgtgcaagacgtgatataaaggatggaggagaattgcaaacaaatactgaactcttttgagaagatttgtcttttagtagtgtgggcaaagcaattctgaaaccatcgtagatgcattataggattaagaaaataagttgaggctgggtgcaggggctcatacctgtaatcccagcactttgggagactgaggcgggcagatcacgaggtaaagagatcaagaccatcctggccaacatggtgaaaccccatctctactaaaaatacaaaaattagctgggtgtgctggtgcatgcctgtaatcccatctacccaggaggctgagacaggagaatcacttgaacctgggaggcggaggttgcagtgagccgagatcatgccattgcactccagcctgggcagcaagagtgaaacgctgtctcaaaagataaaaataaaaaaaaggaacgaagccttcttagaaaaatgatttatcccaagactggagcaggatagatacaagataagcctgggacatcttgtaatgttttaataatttttgtaagaaagtaaggaaagaggccgggcgcggtggctcacgcctgtaatcccagcactttgggaggccgaggcagctggatcatgaggtcaggagatcgagaccatcctggctaacaaggtgaaaccccgtctctactaaaaatacaaaaaaaaattagccgggcgcggtggcgggcgcctgtagtcccagctactcgggaggctgaggcaggagaatggcgtgaacccgggaagcggagcttgcagtgagccgagattgcgccactgcagtccgcagtccggcctgggcgacagagcgagactccgtctcaaaaaaaaaaaaaaaaaaagaaagtaaggaaagagcctgtaatcccagcactttggcaggccaaggcaagaggactgcttgatcccagaatttcacaaccagcctgggcaacatagaccttatctcaaaaaaaaattaaaaagtagccaggtgtggcacacgcctgtagtcccagctacttgagaggctgaggtgggaggatcacttgaacttgggaagtcaaggctgcattgagctgtgatcaggcccctgtactccagcctgggtgacagtgagaccctgtctcaaaaacaaaacaaagcaaaaaaaggaaggaaaagtacctaaaaatatcatggagacttgtcataaggacacaggagccagctggaaggaactcccactggctaaatctgggtcaatttgagtgctaaacaagtacattaatgaactgtgaaccactggaaggaaaatgaatcatgagtagaatgtcaagtgccaactggtaaatgtaggattgctggagttggcagcttatcattctgcaaccattgtgttaaggattggatcaggcaagaatcatcaaaggatcctaaatctaggggcagtttcaatgaggagccaggatatttgcatgccttccacatatctcaagggaaaagttagtaattataaaatgggaaaaatggacaccttgaccaggtaataaaagttaacattattaaagaaggacacatggaaatccatgatacctagagaaggacacataactaatatagtactatattccagtcaagaatgcataacctgaatttaatcatgaggtaatatcacacaaaccccaaattaggaatgttctgttacaaaaagggggatcgcatttttcaaaaatgcgaatgtcatataaaacagactgtgggaaaggtctaggtcaaaggaagcaaaaaagactggacgactaggcagtgcctgtcttttactggatgagaagaatgtgataaaggacatgatgattagagaaaaatgttgtttcaatgttaaatgtgctgaagctgataatactgtggttttataagagaataaccatattcttaggaaataatctaagaagtgtttaagaataaaggaccatgattctactgtgtattggttcaaaaaaagattgtgtgtgtgtgtgtgtgtgtgtgtgtagaaagaggtaataaaagcaaacagtaaaatggtatcagtaggtgaataggtaaatctgggtaaaagtatatggtgtattctttgtactattcttgtgactgttgtgtaaggtttaaattatttccaaataaaaattttaaacaatttttaaagtttaaaaagttaaaatatagcacatctcaagaattttcttagtcaaccaattataacagaccatactctaggatcatcagttttggattatttcctttgatttgttgatgaagcactaaactgaaagcaataggaaattttctttatagctgtagtttctacctattgaaggccattagcttctattaggagattgtattgaattggatacatttatttttcacaaacaaaacaaagtctctaattttcacttgtacttctagctagatgaaagagagaaagtggccatgtgcggtggctcacacctgtaatcccagcactttgggaggccaaggtgggtggatcacctgaggtccggagttccatgccagcctggctaccaaggtgaaaccccatctctactaaaaatacaaaaattagccgggcatggtggcgcatgcctgtaatcccagctacttgggaggctgaggcagaagaatcacttgaacccaggaagcagagattgcagtgagccgagattgcaccactgccctctagcctgggcaacagagactccgtctcaaaaagaaaaagaaagagagaaagtgaatttgttcatacatatcctcaaagatctttacagctgccttacatttcagattgttacctaggtcttagtttagtttactataaccttttgacccaaaagtaggaatattgccagctaggaatcagtaatgctattgcaataaaaagggaaagtgttttaagtaaagcgctctaatttggaagcattaactcaatttatatattttgttcttgagacaaaaaaattgagtgaagttaaagttggcaaacaagatcagttttggcttttgcactaacctcaagaaaaataactactgtaatatcaaatgtcagacatttagtctgcaattgctaggtgtttaaccaaaataaaaataattttatttgttgaagtttaaagaaagaaaatataaaaatcagaaacagaacttttgctcatggccatataacaataaatagaaagtttggtgatggtgagttttttctcctttaaaatttttcattatggcagggcacagtggctcatgcctgtaatcccagcactttgggatcgcttgatcccaggagtttgagaccagtctgggcaacatggagaaaccccatctgtaccaaaaatacaaaaattagctgggcatagtggcgcacacctgtgatccctgctacttgggaggctgagatgggaggatcacttgagtatgggaggatcacttgagtttgggaggcggaagttgctgtaatccaagattgcgccagtgcactccagcctaggctacagagtgagaacctgtcttaaaaaaaaatgaacataaaaattttaacaaaaacacattttaaaattacaaaaaactggccaggcgcggtggcttacgccactaatctcagcagtttgagaggccaaggcgggcggctcacttgaggtcaggagtttgagacatcctggccaacatggaaaaaccctgtctctactaaaaatagaaaaaattagctgggtgtggtagtgggcgcctgtaatcccacctattcgggaggctgaggcacgagaatcgcttgaacccaggaggcggaggttgcagtgagcagagattgtgccattgcactccagcctgggcgacagagtgagacactgtctcaaaataaataaaataaaataaaataaaataaaatagccaggcgcagtggctcatgcctgtaatcccagcacgttgggaggccgaggcaggcggatcatgaggtcaggagttcaagatcagcttggccaatatggtgaaaccccatctctactaaaaatacaaaaattagctgggcatggtggcacacccctgtagtcccagctgttcgggaggctgaggcagaagaattccttgaacccaggaggcagaggttgcagtgagccgagatcatgccactgcactccagcctgggcgacagagcgagactctgtctcaccaaaaataataaaataaaaaataaaattactaaaaactgtgcaaacttagcaaagaaataagtggatcgccgggcacggtggctcacatctataattccagcactttggaaggccgaggcaggtggatcatgaggtcaggagttcgagaccagcctggcctatatgacgaaaccccatctctactaaaaatacaaaaagtatagccaggtgtggtggcatgtgcctgcagtcccagctactcaggaggctgaggcagaataatctcttgaacctgggaagtgaagcggaggttgcagtaagctgagatcgtgccactgcactccagcctgggcaacagaaagagattccgtctcaaaaaaaaccaaaaacaaaacaaaacaaaaaagtgggtagtgtgggaagactgtggaaaggttattttttatttttttgaggcggagtctcgctctgtcgcccaggctggagtacggtggctcactcggctcactgcaagctccgcctcccgggttcacgccattctcctgcctcagcctcctgagtagctgggactacaggcgcctgccaccacgcctggctaatttgtttttgtatttttaatagagacggggtttcaccgtgttagccaggatggtctcgatctcctgacctcatgatccgcccgcctcggcctcccaaagtgctgggattacaggcgtgagccaccgcgcctgctggaaaggtcacttattattcctatagttttgtattgtttgaatctttaatttaaaatgagaatatattcatgtattatttgtgtaaccaataacctgcttgtttatttggaaaaagagaaaaatgacataagtagcaaggaaaaaaataatctccaatagtctctacacccatatacaaccattgttaatatttagaatgtttctttccagtcttttctcttttatttttgcgtagctgtatttgtaatatacatccattttagatcctgcctttttgtttaacataaatattttccaggttactatatatgtttcatagttgtcaggtttttgttttgtgttgttgttttttgattcggtctcgttctgttgcccaggtgggagtgcaggttttttgtatttgtatttttagtagtttggccaagctggtctcgaactcctgacctcaggtgatccacctgcctcggcttcccaaagtgttggaattacaggcgtgagtcaccacgcccggccacatttttatactttttcaaaatactagtgtaacatctcacgtaccccataaatatatatacctactatgtacccacaaaaataaaaaattaaaaaatatatattaatgtagaaggcacaggataagagaaatataaggttgcatcctttaggaaaatattaattctttaatgcagtagtaacaaaattccatttacacattatttattgttcatcagacagttttcattctgaagttttgctagctctgcacttctgaatgccagcctctatcccgtatctaccctacctacctaccttgctcctcttctctcaaaaagtaatcctttttcatgttggggtttttaaaattttacattacttatttgcctgatgaacaaagcaaaacctgttaactgacctggcttttactgataaactcagtggaagcttttcgtctgtaaaatctaagtcccggccgggtgcagtggctcacgcctgtaatcccagccctttgggaggccaaagtgggcagatcacctaaggtcaggagtttgagaccagactgatcaacatggagaaaccccgtctctactaaaaaaaaatgcaaaattagccgggcgtggtggcacatgcctgtaatctcagccacttgggaggccaaggcaggagaatcgcttgaacctgggaggcggaggttgcagtgagccaagattgcagcattgcactccagcctgggcaacaagagtgaaactctgtctcaaggttaaaaaaaaaaaaaaaaaaaaaaaaaaatctaagtcccaagcatgtatggtggaattgaccagtgtttaataaatatcttctgaaatactagacagaattggttgcagactatgaaataatttccatgtctttatttcaacaactgcaatttttattgtctttttaggatttccaattccatgtgtccctctcttcctgccttaactgtgtctcatttccttataatgtgctctctgattactgagcattttctgcgtattttcatatgcaaaaactaattacccatctaataattatttagtggtttcagatacagacgtactataatagagtcatagatacatggaaacatttaaaatacattcaaaaccaagatgagactagccatgatttgagtaacaagcatctttaaaataatgttaaataggctgggtgcggtggctcatgcctgtaatcctagcacttggggaggccgaggcgggtggattgcctgagttcaggagttggagaccagccttggtaacacaatgaaacccgtctctactaaaatacaaaataattagctgggtgtggtggcatgcgcctgtaatcccggttacttgggaggctgaggcaggagaattgctggaacccgggaggcggaagttgcagtgagctgagattgcgccattgcactccagcctgggatgcagagcgagactcaaaaaaaataaataaaataagttaaataatagttgaacagacacaactttgactaagaatacacggacaacttcaatatactgttttgagcacttctcaaaatgtctcattaaaaacaacacattttgtattagctgtaatatgaaattagcttaatcaactgccaaaaaaaaaaaaaaaaggataatttgagggagagaagcataaggtttcacttgattgtttggaatgttatatagtgtaatgattaagagcataggtcatcagtcgtagtgcctgggttaaaaaccttgctgttaaacttgctaaacataaccttgagcagattatttagcctctgtgcatcaattacttcatatgcaaaataatagtatccaatttatgtgggtgtttagattaaacaagataatacactaaagtgcccacatagagaagacattcaataaataacagttactttcttaggaaataactgtctttaagtcattttagaaactattacaaacatcctcccccatatcattttccttttaccataaaggatacttttctgctaatttttatttattatgtatgaaagcctatattctgtgattttttttttaatttgaaggattgttattgagtttcctatgatatttgttgtttcctatgtccttatacttgagaaacagaacacatactatttcctgcatctttcatacacagaaaaaaaataaaagctaagccgggagcggtggctcacacctgtaatcccagcactttgggaggccaaggcgggcggatcacaaggtcaggagtttgagaccagcctggccaatatgatgaaacccacctctactgaaaatacaaaaattagctgggcatggtggcaggtgactgtagtcccagctacttgggagactgaggcaagagaatagcttgaacctaagaggcggaggttgcagtgagctgaattcaccccactgcactccagcctgggcgacagagtgagactccatctccaaaataaataaataaataaataataaaagctataggaagttgttcctgaaaaaccagatattctgccttttttcctccaattgtatatttgtaaaagtgtttagcaataagtaagaggcagtggatcctcattgttcctgaattccgttttgccccccttttacttgctaaaatgtatttgtaaccccaaaaccaatattcacagtgctttcatggttattcctagacatgcacagagtggcaaaaaattcaagtcacccaaggtgcacgttcctagcttaggttgaagaaggctatgctctgccttcttgtttcagttgtcatactgtaaacaagtatctttttcagtctatttagtggtattcttttgcatttttatgctttttgttgcttttgtggtttgaaatggcctgcaagagtggtgccaaagtgctgtctagtattccaaagaacaagaaggctgtgatacaccttcaggagaaatacgtgtgtgaggtaaaattcattcaggcatgagttatagtgctgttggccatgagttaagtgtcaatgagtcaaccatatacaaccatatacagtatgttaaataagttgtctttaaacagaaaaacataaaagaaggctatgtatttggaatgggttgacagaacgttgtgacttgaggctctttttaagttaacagggcatggtggcatgtgcccgtacttccaaagtagtcccaactgtttggaaggctgaggtgggaggatcatttgagcccaggagtttaaggctacactgagctatgatcactctactgcactccaggtggggcaacaaagcaagaccgctctaagaagggccaggcatggcagctcacacctgtaatcccagcattttgagagcctgaagttggtggatcacttgagcccagcagtttcaatagtaacttgggcaacatagcaaaaccccgtctctacaaaaacaaaacgaaatgaaagaacaaaaagattagccagttgtggtggtgcatgttgtagtctcagctatttgagaggctgagatgggagaattacctgagcccaggaagtcgaggctgcagtgagccatgattacaccactgcactccagcctgggtgacagaccgagaccctgtctcaaaccataaataaaaataaaaaagaagaaaaaaatcaaaagtgtatatattgtggtaggcagcttctgacatggttcccaatgatccctgcctcctggtattctcacccttgtgtaatcctgtccttctgaatgtgagctagacttaataacttgattttaacaaattagacaaaagtgatggtatatcacttctgtaattaggttttaaaagaccatgactgttattttgctgatgtgttctctctggctcttcttttgtgcttgctctgttgaagagggccacttgacaaagaactgaggtcagctaacttgccaatacccagcaaggaactgaggcccatagtccaacaatttgtgaaccctgccaacagctattgagtgagctcagcgatagatactgtcttagttgagtcttgagatgactatggcaccagcctacaccctgattacagtcttgtaaaagatcctggcagagcacttatataaacagtatgtagattcccatagaaactgtgagataataaaatttttttaataaaaaaaagtagagcagtttaggttgatagcaaaattgagaggaaagaagagaattcccgttatctcccctctgctcccacacatgcatagcctcccccattatcaacattcccaccagagtggcacataatacagttaagtatttgtatttacacattaaaacctccaaacacatgcttgagatggggtgtgcagtaataagcactactgtgttttaacctttggcagcttttattctttcctcccaactttcaattattttcttttcatttccaattttttaacctttctctacttgaaaatagtgaccagtttctttttggttatagtcatcctaatgtgtatgatgtaatatctcattatggttttggttttcatttccgtaatgaataatggtgatgagcatcttttcctgtgcttcttaaacattgtatattttatttggtaaaatgttaattcaaacccattgcccatataaaaattgtgcatatttgtctttttattgttgagttgtaaaagttctttttacatagtagatacaagtctcattctttggcttgtcattttacttagttggtggtattctttgaggtacatagttttgacatttttaatgaagtctaatttatctttttttattttgtcactctgaaaccattttctttttctttttcttttttttcttttaaatggagcctcactctgtcgcccaggctggagtgcagtggtgcgatgtcagctcactgcaacctccacctcttgggttcacgctattctcctgtctcagcctcccgagtagctgggattacaggtgtttgccaccatgcctagcatttgtatttttagtagagatggggttttgccatgttgggcaggctggtctcaaactcctgacctcaggtgatctgcctgcctcggcctcccaaagtcctgggaatacaggtgtgagccaccacgcccaacctgaaaccattttctaatacacagtcacaaaggtttgctgttgtgtttttttcttggggttttatagttttagctcttacatttaggtctgtgatccattttgagttaatttttgtatatggcatgaggtagggagtccaacttcattcttttgtttgatatccagttttccagtatcttttgtggaaaatattatttttcccaattgaaaagtcttggtatccttgtcaaaaatcaattgacaggccgggcacggtggctcatgcctgtaatcccagcactttgggaggccgaggcgggtggatcatgaggtcaggagatcaagaccatcctggctgacacggtgaaaccccatctctactaaaagatacaaaaaaattagccaggcgtggtggcatgtgcctatagtcctagctactcaggaggctgaggcaggagaatggcatgaatctgggaggtggaggttgcagtgagccgagatcgtgccactgcactccagcctgggcgacagaccgagactccgtctaaaaaaaaaaaaaaaaaaaaaaaaaaatcaattgaccgtaagtgcaaaggtgtatttctgaactcttaattctattccattcatcaatatgtcaaggatccattgatccttatgccaggaccacactgtcttgataactattgctttgtaattagttttaaaatagagaaagctgagttctccaactttgttcttctttttctttctcttctcttttctcttctcttctcttctcttctcttgagatggagtttcactcttgttgcccacactggagtccaatggtgtgatctcagctcactgcaacctccgcctcccaggttcaagcaattctcctgcctcagcctcccgagtagctgggattacaggcttgcactaccatgcccagctaatttttgtatttttagtagagacagggtttcaccatgttggccatggctggtctcgaactcctgactcagctgatccgcctgcctcagcctcccaaagtgctgggattacaggcgagagacaccgtgcctggcctgtttttctttttcaagattattatggctgttttgggttccttgcatttccatatgaattgtgatcagttttccatatctgaaaaaagacaactgggattttgataggcagtttggggagtattgctatattaacaatagaaagtctcttaattcatgaacacgatatctttccatttatttagaccttatttcatttatttcaacaatgttttatagtttactcagtgtacaagccttacagttcttttgttaaatttattcctaattatttttcagagcagtgttttctgtcttagtcaagacagctgcatgtagtgtatgtacgttacaataaattattttgtaaaaattttagctgtggtaaaatacacaaaatgtgaaatttatcgtcttaccatttttaagtgtacagttcagtatagttcctattgtcgtacgaccaatctccagaactcttcaccttcaagtactgaaactctatacccattaaataacaactcactattaccccttcttctcaggccctccagccaccctctactttctgtctctatgaatttgactactctaagtatatcatataagtagaatcatatcatatttgtctttttgcaactagctcatttcacttagcatagtgtcatgaaggttcatccatcttgtagcatgtgttagaatttttttgaaggctgaataatattccattttacgtaaatactacatttattcatccattcatccatcgtggacacttgagttacttctacctcttggctattatgaataaagctccaatgaatgtaggtatacaaatatctctttgagaccctgctttcaattcttttggatgtataccaagaaatagaattgcagaatcatgtgataaaaatgctatttttaattttttttaagagacagggtcttgctttgttgcctagactggagtgcagtggcacgatcatagctcactgtaaccttgaactcctgggctcaaatgatcctcctgcctcagcctcccgggtagctaggattacaggcacatgaccccatgcctgtctaattttttttttttttttgagacggagtctcactgtgtcgcccaggctggagtacagtggcacgatctcggctcactgcaacctccgcctcccaggttcaagcgattctcctgcctcagcctactgagtagctaggattacaggcacccgccactatgtccagctaatttttttgtatttttagtagagacagggtatcaccatgttagccaggctggttgcaaactcctgaccttgtgattcacctgcctcggcctctcaaagtgctgggattacaggcatgagccaccacacccggctgctacctggctaatttttaaattttattttagagataggatcttactatgttgtcaggctggtcgtgaacattcagcttcaagtaatcctcccacctcagcctcccaaagtgcggcgtgaaccactacgcctggcctagttttaattttttgagaacctacaagggttccagtttcttcaccttcttgccgtcacttgttattttttttaaatagtcgctgtcctaatgggtgtgaggtggaatgtcattgtggttttgttttatatttccctaatgattggagatattgagcatctttttatgtgcttgttggccatttggaaaaatacctattcaggtcctttgcccattttttaattgggtcatttgttttatgttgttaagttgtaggagttctttatatattttggatattaaccacttatcagatatatgatttgcaaatattttctcccatagcttgccgtttcactcttttgattgtatccataatgtgcaagtttttatttttgtttttgtttgttggttggtttttgtttttttgtttttgttttttttttgagatggagtctcactctgttgcccaggctggagtgcaatggtgtcatctcagctcactgcaatctccgccccccaccccgcctacccgcccaggttcaagccattctcctgcctcagcctcccaagtagctgggattacaggtgtgtgctaccacatctggctaatttttgtatttttggtagcgatggggttttgccatgttggctaggctggtatggaactccctgacctcagtgatccgcccacctaggcctcccaaagtgctgggatctattataggcatgagccaccacgcccagcccaaagtttttactttggatgtagttcaatttatctattcttttgctgcctgcaagaggtaattctttatttggtattggaacttgttactcaggaatgtgttcttttgaccgggtacagtggctcatgcctgtaatcccaatacttcaggaggctgaggtgggaaaatcatttgatgccaggaacttgagaccagcctgggtaatatagtgagaccttgtctctgaaaaataaaaagaaaagttagctgggcatagtggtgcacacctatagtcctagctactccagaagctgaggcagttggatcacttaagcctaggagtttgaggctgcagtgaggtgtgactgcactcaggcatcatgagagagtatcttactctatataactaacccagaagatgataaaaatttgaagtaagatttctatacattgcttttaagctatggtaaagtcaaaaaattttaagtcgggaagcatctgtatttctcattttcaactgttacaggaactactttaaacagcacagatattctaaacacatcactttggttgttcccccaatacttgtctgttgtttaaaaatcaaggctttgtgttataatatgctgttcagtgtcagtgtctaatatttccttccttccttccctccctccctcccttccttctttccttccttccgaaaaaaaataaggccgggcgcggtggcttacgcctgtaatcccagcactttgggaggccgaggcgggtggatcatgaggtcaggagatcgagaccatcctggctaacacagtgaaacgctgtctctactaaaaatacaaaaaattagcgggcttggtggcaggcgcctgtagtcccagctgctggggaggctgaggcaggagaatggcgtgaacctgggaggcggaggttgcagtgagccgagatcgcgccactgcactccagcctgggcgacacagcgagactctgtctcaaaaaagaaaaaggctgggcgcggtggctcacgcctgtaatcccagcactttgggaggccgaggcaggtggatcacgaggtctggagatcgagaccgtcctggctaacacggtgaaaccccgtctctactaaaaaaaatgcaaaaaattagccaggcgtggtggcggttgcctgtagtcccagctactcgggaggctgaggcagaagaacggcatgaacctgggaggtggagcttgcagtgagccgaaatcgtgccactgcactccagcctgggcgacagagtgagactccgtctcaaaaaaaaaaaaaaaaaaaagaaagaaagaagaaaaaaaatagagatgaggtctcactctttcacccaggcttgtttcgaactcctgggctcaagcaatcctcccgactcggcctcccaaagtgctgggattacagacatgagccactgcgcccagccaatgccctaatagtttctaattatttttgaataatataaatggtaattaatgcctctgttttttaattatagaactttaagatgtgtttagtgatcctaagtatgactggtttttacctgaaacttttttttgtagggttgccataataaattatcacaaatagggtgactaaaaataacagaaatttgttcttggacagctttggaggccagcagtctaaagccaaggtattggctgagttggttccttctggaggctgtaaaggagaatctgttacatgccttgagatctcctagctttgacaggtttcagtaaatcattggtgttcctcggtttgtagctgcgtaattctaatctctgcttctgccttcacatggccttcatctctatgtgtctcaaatctccctttgcctttatctttttttttttttttttttgagacagagtctcactctgtcacccaggctggagtgtagtggtgtgatctcagctcactacagcctctgcctcccgggttcaacggattcttctgcctcagcctcctgagtagctgggactacagttgcacacgaccatgcctgcttattttgtatttttggtagagttgggctttcaccatgttgaccaggctggtctcaaactcctgacctcaagtgattcgcccgcctgggcctcccaaagtgctgagattacgggcatgagccagggcacccagcccctttgcctttatcttataaggacatctgtccttgaattcaggaaccaccatatgcaggatgatctcaagatccttaattgctaagtgagggcttagtgcctagggtgagggcaagggcagttctctaaagaactgccattggcctttaggataaaacatcagttgtaccagaccatcccaagcattgaaggattttaaagttcctggtctacactcattaatgccaatagccctctaaccctaatatgacaattaaaaaaaatgcccccatacactttcacatccctttcccagcaggaggaggaatgcttgtcttaagaaagaaaggatatttagaacatatattgccttacttctccatgctaatggaaggcataatgtcatacagaaaagtagaaaacagacacagaattagtgtctctcttttgaaattgtctacttacctatcaacatgagttctgaaatatttgtattattttgaaatagcaaaataatgagacaggccgggcagggtggctcacgcttgtaatcccagcactttggtggggcaaggcaagcggatcacttgaggccaggagtttgagaccagcctggccaacatggcgaaaccccatccctactaaaaaatacaaaaaaacttagcctgcctggtggtgcacgcctgtagtcccagctactcaggcggctacagcacaagaattgcttgaacttgggaggtggagttggcagtgagccgagatcgcatcactgcacctgggcaatagagcaagactgtctccaaaaaaaaaaaaaaagacacattaaaggcttattgcacatgttcgtagtcttatttcaatttttattcatcttcagaatgaattatatggaccattctacttagaataaagaactttaagactgggcatggtggtttacacctataatcccagcactttggcaagccaaggcaggagaattgcttgagtccaggagttcaggatcagcctaggcaatatagtgagaccctgcctctacaagaaatttttaaaaaaattagctgggtgtggtggtgcacgcctgtagtgccagccactcaggagtctgaggtgggaggatcacctgagccccagggagatggaggctacagtgagctgtgtattctcatgggtcttatattttgaaagaaattatgctgtacaaattatacttattataattgatttccccatttttattaataaaaaaatgcctgcctaatagagctttttatccgcatgatagcaaactattttttaattatgttctgaaaataaaattttacttaagcaaagacacctggcatatgtaagcctatgaagctttattatgcataaataagtttgattttcaagaggtttttttttctaacactgaaagtaacttagtctgttttataatagtcatctaggaacttaatggctaaagaagaccccaggttgggcacttctaatgaatttgtagactgaaaattgagaattctgtataatgaatcagattcatacatcagagttaatactaacaagaatttgaacataataattttcctggaatagtaagtagtttgtctttatatcactaataaataatgatcagatttccatgaaacttgaattacagttaaaaaatcaataagataaaaacgtagaggataatatttgaggctgcttctctatcacaaatcaatgcaaacgccagaacactgctataaagtcaagtgttctattctgaagggtttactttgcctgtattgcaccacaatcaagttatactttttgtatttttctgaactggtctgggttcagtttcctcgaagaaaataccacctagctagtttatgtaagaaaggacagcaaattattaaaatgattgcagaattgttgagagcacttgaataatgatcctcaaactttagcattaatcagtatcagtttggaggcccttgaaaacagattgttggccccaccctcaagatttttttactataggggtgcaccaccaacacccggccaatttttgtaattttaggagagattgggtttcgctattttggccaggctggtcttgaacttttgacctcaggtgattagcatgcctcacccttccaaagtgctgggattgcaggcgtgagcctccgcatgccactgcgcccagcctatttccagtataatcttgtcattagtgctccccatcatgtatttattcatgtatccattcattcattcaacaggtattgaatacacactatgcatgcaagccactttcaaatattggcaataaagaggtgaatacgattttgtttctcattctctttattatccctatccgtgaactcctgttgagggtataaaggtgaatatgtcaggaaggaatatgggtagattggaatattgtaattatgccaataattacaatattatgacataagtgctgacagtattataaagcattttataaatactgaaaattgtgtgagttcaggtgtttatatgtatattcttaatattttaaaaataaaacatcttttgaaaaaggtgagaaccacccttagactgttttttaaaatgtgaaatttactgtcttaacctttttaaacaaaaaaacaaaaaaacagagtcaggttctcactctgtctcccaggctggagtgcggtggcatgatcatagctcacagcagcctcaaactcctgggctcaagtgatcctcccacttcagcctccctagtagctagaatcttttttttaatgttttgtagagacagggtcttgctgtgttcctcaggatggtctcaagctcctggcttcaagcaatcctcctgcctcggcctcccaaagtgctagaattacaggtgtgagccagcatgcacagagtttaaccatttttaaaaatataaaatttactctcatagtaatttttaagtgcacagtttagtagcattaagcacattcacattattgtgtaaccaacctccagaactctttttgtcttgcaaaactgaaactctatacccattaaacaactcaccaatctcccctgctcccaacccttggcaattaccattccactttgtgtctgatgaattttactacttgagatacctcatataagtggaatcataaggtatctgtctttttgttactttttttttttttttttgaggtggagttttgctcttgtcgcccaggctggaatgcaacggcacaatctcagctcactgcaacctctgcctcctgggttcaagtgattctcctgcctcagcctcccgagtagctggtattacaggtggctgccattacacccagctaattttttgtattttaagtagagatggggtttcaccatattgaccaggctggtctcaaactcctgacatcaggcgatccaccctccttggcttcccaaagtgctgggattacaggcgtgagccaccacgcccggcctttgttgttcttttgtaccattttgtgtactgtttttcagattttaaagtaaatggagatatgaaaaaagaaaaacaaagttaagggaacgaaaagcaaggaataagacaattataaaagtaaagacagtggtgattaatttaagtcacaatagatggaattcctatataacctagagagaaagttagaatataattggactaagaagaaggtgctgaagatagaagtagatttaaagttgtagtttaaggtttatacatctcacaagtggtaaataaatgttgatctttaggaatattacatatcttaccccacaaaacaactgaagtgctgtgttttaaataaacaaacatgattaattttaacagtgttaaaaattcattttatagttagtagtgggattctgggcattacttacagactcctttgtttggataaaattttgtctacaattgtgagaaaaacatggacagaatttttagaaaattgaaagttttatatgttgacacacacctacgtaagatgttacatgggcagtagtaggcatactaatatatcagtcagctgttgctgataatacttcatcagcaagccacccctaagctcagtggctttaacaacaagcatttattctcataatcataggtttgtagaacagctggattttggctgatctaggcaggactcagcttcaggcttcaggatcaattcatatctttttgtctgggacccacgatcaaggggcaacatttactcaagcttctatcaatagtggattgcctgctcataagaagtgcaaacgcagctacccaagcatattttagatttctgctcgccttatatttgtcagcttctcattggtctgatcaagttatgtggccagattcaaagtcaaggggcaaggaggtacactccatctatcacgaggccgtggcagaaggtggatatattttcattatagggaagtgacaattttaggaagtaaagagagttaccttctaaagtcaaaaggtatgtacacacacacacacacacgaggttgtactaaatatatagctactcaaagatatgtatatatacacaaatgcacacacacaagtatgtattggaacctatacatttagtaccacttattttttgtgtatggtatacattcatttccttgaaaatgaaaataagttctttgcatgtaagaatggacatccaaaatgtacccacaatgatataaataaaaaatacttttctcactctgctagcttttacttttgtctgtttttgttttattttgttttaaaaccaagatagagttggattaaaaatagaacttcctgcatatgccagaatttctccagtgcttctaagcaggacatgtgaatgcctctgagacaggtttgcagacagaaatatgtacagggagaaagaagagaacataaaagaataggaagggtaaagagtaggattagggaaaagaagtgtctgttttagagatcaagtaccagcaacaattaatctaaactccccttagggtcatcagtgcccttgatattgttacttccttactctcactatataaggagtatggtttgtaggatctgagcaatgtttttttgtttttgttttttgttttgttttttgttttttgtttttggagacagagtcttcttcttgcccaggctggagtgcagtggcacaattttgactcactgcaacctcagcttcccaggttcaattgattctcctacccgagtagctgggattacaggcatgcaccactatgcccggctaatttttgtatttttggtagagatggggtctcgccatgttgcccaggctggtctggaactcctgggctcaagcagtcctcccacctcagcctgctgagtagctgggactacacagatgcgccactacacccggctaatcttttaattgtttgtagagatggggtcttggcaggttgtctaggctggtcttgaactgctgggcttaagtgatcctcccgccttgggctcccaaagtactgagattgcggtcatgagccactgctccgagcccaccctacctctttattcccaagcttttctgtctattctgttccttccctaagtacgtctctttttttattttttatttttttttgagatggagtttcactctgtcccccaggctgaagtacagtggcacgatctcggctcactgcaacctccgcctcccgggttcaagcaattctcttgtctcagcctccagagtagctgggattacaggcacccaccactacacccagctaatttttgtatttttagcggagaccaggtttcatgatattggtcaggtcaggagatccacccgcctcagcctctcaaagtgctggaattacaggcatgaggcaccacgcctggccaggtgcatcttttactaactctggcctgccttattgctgactactgcctctagtgccaaaagagaaacaactagaggatgtacagcctatttgtctgcttcatttaaaattcttctcttagcaacaaaattaaagtcctaaatataactaaaaaatcaaatgtatacatttgtggaatgtaaaaggaattacacacaatgttctttttattgtcattatagtccccaggctccttacaaggaaaagtagctacatttgttacatagaaaaacagccctgaattattttcagctacatacaaacaccatggttaaatcttcaaaacatattactgaactgaagaagcaaggcacaaaaattccatttatataaaattcagaaataggcaaaaaaactcagcattcagtgatagtaatactattaagaaaagcaaggaaatgattaccacagaagtcagaatagtgactatttctggggcagaggaaggatgttaggaacaggtaggagcaggtaggagacttttgggacccttggtgttgtattttgtggccttggtgctagttacataagtgtttgcttcatcatgattcaccaagctctgcattttgtattataaacattttcgtgtataatgcttatacattatacacgaaaatgtatataattttgtgggttatattttgtaaggtttaaaaaatggaagtcaggatgggcggttacaagtggtgactcacgcttgtaatcccagcactttggtaggcctacgcaggcagatcacttgagaccaggagttcgagaccagcctggccaacatagcaaaaccccttctctactaaaagtacaaaaattagccaggtgtggtggcaggcacctctaatcccagctacttgggaggctgaggcaggagaatcacttgaacccaggaggcagaggttgcagtaaacagagatcccgccattgcactctagcctgggcgacaatagcgaagctctgtctcaaaaaaaaaaaaaaaaaaaaaaaccaaaaaaaaaaacaaaaaggaaatcagtgtgcgaagtgggaaagctagagcaagggaaacaactaggaaacagaccaggagaaatttaatggggaaaaaaagttatttgtttttctccaaatatctatcttgttttccttataagagagcaaaggttactatgataattaaaataacataaaatgaattgagggagttgcctgctgatgtgattcatattttgttgttcaatcagtaaataactggaagatacagctttcactttgatagtcaaattagttcatggtcattttctgaaaacagttcttgagtatggattctgaatttagaactgtcattttgtagagcagttaggaaaattgacgagggatctttgagtgacatagtctttggtttagttctatattgtgagtctcgtgaattttctgtattgtgaattttatttttaatttgttttgttttaaataatgactattatagtgactaggtttccatttttctagtggtaactttaggcttaaatggacatttcttactcaattaggttattggtgttttctaagaatcattaaatactttttttttaaagttgtatagagtaacagactctgttctatcatatctaaaaagtacaatcttagtacaatagaggtaattaaagtagaattataccaaaaatactttgagagcatatttaatggtgttttctttattcttcgatgaaatgttttgatgtacaatggtctgcaaattaattcttctatttttcttgtatttttaaaattcctagtctgtttacttaaatgtgatctttccattttttatttaatgattttattccaatcaaatataattaactgttttaattcattctttaataaaataaacaaattgctgaaattgtctctcctaatcataaaatagctatttaaaatacactctaaagaaattaaaattgtaaatacttatggagctaaaagttaaggaggaggggcactgaatgtttttcccattttttcatgtcttttctaaccttttggcgggggtggaatttaactttagactgttatttctctctcttcttcagtttttcactgtttctttcataattcactcatcgaatgccttgattcaattagccaagtatgggctattttttttgttgttattttttgctttttcttccaagctagatctattcaaaatgattaacaagttaaatttaaaccagtctttcatattcagtattaactacttgtttgaaaaaacaagaaatctgccccctctcaattttttagggcattaaatgtaaacattagtctgattatgattactgccattccaaacatattaattaaaagcaacgtttatttcctataaaaacatttgttcaaaacattgagctccacaataaatcatagtacagaaacaatatcataacaatttggattattttgctaatgaattcacttaactgatcacatcgttttggatttaaatgtttttctctacttgtatgaaagctacattgcttgaaaactacaaaaactaatccccaatttgcctttctacacagtggtaaaagattaaggagctgacataaccactagtgtgttatatttaagcttccctttgctgcttgctgcacatgttacaatgttgttctttctttgacacagacccagacaaaagctgagtgtagcaaggaaacagacagaacgcctccagtagtggcccccgcctggctccaggatttgtaaacagaaacatcccaggctccaatgagacagacagaggttccctgtctgttctgcattcaggaagtgtttgcttgtataagcccaactattgcacaggcatacatagtagtgtttacatttggctgagtatttaactgagaaaacttaatagggaagaaaaagagggtttattagaggtaggagaacaagacaattcaggtataacatagatgtagcatatgttatgtaaaaaggtttttttattttgaagaaatagacaacaaaaaataggagttttctagttaaaggcctcttttgcacgtacacgtgaatacacatattgaaatatttttcctggcagtttttcagggatctcatatttttagaccatgtgacagaggcttggaaagtttttatttgaaatttaaccaatcatatggtttataatgaaatgggaaaagttcccttgtcctgacagggtgcgtgatgcggggtgtggctcacttcttaagtgccccgctgctcagacctctaggggaccatacagacaggtaggctgtggggctccgacctcacaacagtgtctaggagtgaatgtttacagctcctgaatccgcagtgggcgtgtgttacagggtgctcttttagtttgccatctataggcggcttgtgttagctcaattagacccccttccttatcacaaggacagagggatttctgtatcccagggtttcctgccttggtgtacgggaagagtcggctcacacctgggcttggagaatgagtgcaaggtttattagtagaagtagctctcagcagatgggggaaccagaagggagatggttttctcctggagttgggccgcttggtggccagggctctcctccgtctgccccagccaaactccgcgtcgttgtcgttctgtcgacggcctgccggcgtgcgggtgcctatcgttgtgctcttctgctggcgtgctcctctcgacgaccagccactttcttccgccgatgtgctcctctttacgtctggccgcctgtgtgtctgcctgctagggtctcgggtttttataggcccaggatggggacatggcgggtccgggtggtcttggaaatgcaacatttggacgggaaagcaggagtgcctgtcctcacctaggtctgttggggtggagccctagtcagggacgcacctttctctacccattacttacctccccacttccgtgtcatttaaggagggcacactgttcccttcccagcactataacatgtttaaaatgttttaaaacttttttcattctctccaatatatgaattaataatccatttcagattttgaattaatgaatgtttaatgtaaaagttttgttaaattttcttttataaatttgagaataaaagcaaagaatgctgagccttcaaaaaactgtatgagaagactcattatacagagttttggaagtaggaggaccttaaaagtcacttacaagatcacttatttttattttatagtttaatgtattttagtaacaaacaggaacagcaaaaagacagcgttaaaaacgtgcttgaatgtaggacaactcaaaaaagtagagtgaacagatggaacctactctatgattaaaatgctgcaaacatcatttagttgctgtcaataagaaatttacttattttccaaaaatccaaatgcaggcattatccagaaaaatttaacaggtttatttataattgttatggccaggcatggtggtttatgcttgtaattccagcactttgggaggccaggacaggcagattgcttgagcccgggagtttgagaccatcctgagcaacatggcaaaaccctgtctctacaaaaaataaaaattagccagacatggtggcatgagaccagatgcttgggaggctgaggtgataggatcgcttgagcctgggaggctgaggctgtagtgagccatggtcataccattgcactccagcctgagcgacaaagtgagaccctgtctcaaaaacaaaaacaaaaaaaaatcaaaagaacaaattaaataattgttatgaagttgaacttctaaaacttgttcactgaaatgttttgacccgcattaatgctttatgtcccacatttatattgaaaatccacatgcaaataaaaatggaaaaaccaccaatacctcatttctgttccttattttttcacttacaatcttatacttaggtgccttttgaccctatggggaaaaaataatgttcagaactactgagaggtgacagcgtgctggcagtccttaccgccctcgctcgctctcagcgcctcctctgcctgggctcccactttggcagcacttgaggagcccttcagcccaccactgcactgtgggagccactttctgggctggccgaggccggagcccactccttcagcttgcagggaggtgtggagggagaggcgcgagcaggaaccagggctgcgtgccacgcttgcgggccagctggagttccgggtgggcatgggcttggcgggccccgcactcggagcagccggccagccctgccggccccaggcaatgaggggcttagcacccgggccagcggctgcggggggtgcactgggtcccccagcagtgccagccaaccggcactgctcttgatttctcaccgggtcttagctgccttcccgcggggcagggctcgggcctgcagcccgccatgcctgagcctcccaccccctccatgggcccctgtgcggcccgagcctccccgatgagtgccgccccctgctccacggcgcccagtcccattgccaagcggtgagacaatcgctgagcggtgagagcatcacctatccgcaagcagtgagtaccatcggacccctttcgcttgctattctgtcctgtctttccttagaattcgggggctaaataccgggcaccttattggccagttaaaagtgactagcgcagctgccagagtaaagacacgggtgtcaggctttctgggaaagggctctctaacaacccccgactcttcggagttgggaccattggtttgcctagaaccagcttccgcttttcctgtacttctggactgagtcaagggtcgacaaagaggaaagccatgcagctccggggtcccaacaacaagttggttgaccctgcggccatgggcagaactctcaaaggcatgtcacccaagtgagacttgcccatctatcgtatctatcctgacccttgccccctgggtcctaatgcctgccagacaaacttcctctcacctcttttctctgaggctaattagacccacttctaaaaattgctacctgtctctggtgcttttctagtttctcctataagaatgatttctagtataaactccaggactctgttaccttctttaggcacctgggctcaccaatcagaaagacataatttttgcccaaagccctgtcacagtggggactacctggaattttaggatccctcctcagactaacaggcctaacaaaagctattcctgaagctaggatatggggagccttagaaattgtatccttcctattcatataagtgaggacaaaaggtgtcactcttccaaccctggagatcccttccctccctcagggtgtggccctccacttcatttttggggcataacatctttataggacaggggtaaagtcccaagactaacaggagaatgcttaggactcttaacaggtttttgaggatgcgttggtaagggccactaaatctgatttttctcagtcggtcctccttgtggtctaggaggacaggcaagggtgcaggttttcaagaatgcgtcggtaaggaccactaaatccgaccttcctccgtcctccatgtggtctgggaggaaaactagtgtttctgctgctgcgtcagtgagcgcaactattccgatcagcagggtccagggaccgttgcaggttcttgggcaggggttgtttctgctgctgcattggtgagcgcaactattccgatcagcagggtccagggacagttgcatgttcttgggcaggggttgtttctgctgctgcgtcggtgagcacaactattccgatcagcagggtccagggaccgttgcgagttcttgggcagggggagaaacaaaacaaaccaaaaccacgggcggttttgtctttcagatgggaaacactcaggcatcaacaggctcacccttgaaatgcatcctaagccattgggaccaatttgacccacaaaccctgaaaaagaggcggctcatttttttctgcactacggcttggccccaatattctctttctgatggggaaaaatggccacctgagggcagtacaaattacaatactatcctgcagcttgaccttttctctaagagggaaggcaaatggagtgtcttaccttatgttcgagctttcttttcattgagggagaatatacaactatgcaaagcttgcaatttacatcccacaggaggacctctcagcttaccaccatatcctagcctccctatagctccccttcctattaatgataatcctcctctaatctcccctgcccagaaggaaataagcaaagaaatctccaaaggaccacaaaaacccccgggctatcggttatgtccccttcaagctgtagggggaggggaatttggcccaacctgggtacgtgtccccttctccctctctgatttaaagcagatcaaggcacacctggggaagttttcagatgatcctgataggtacatagatgtcctacagggtctagggcaaacctttgacctcccttggagagatgtcatgctactgttagatcaaaccctggcctttaatgaaaagaatgcggctttagctgcagcccgagagtttggagatacctggtatcttagtaaagtaaatgatagaatgacagctgaagaaagggacaaattccctactggtcagcaagccatccccattatggatccccactgggaccttgactcagatcatggggactggagtcgtaaacatctgttgacctgtgttctagaaggactaaggagaattacaaaaaagcccatgaattattcaatgatgtccaccataaatcagggaaaggaagaaaatccttctgccttcctcgagcggctacgagaggccttaagaaaatatactcccctgtcacctgaatcacttgagagtcaattgattctaaaagataagtttattacccaatcagccacagataccaggagaaagctccaaaagcaagccctgagccctgaacaaaaatctagaggcattattaaacctggcaacctcggtgttctataatagggaccaagaggaacaggcccaaaaggaaaagcgagatcagagaaaggccgcagccttagtcatggccctcagacaaacaaaccttggtggttcagagaggacagaaaatggagtaggccaatcacctggtaggtcttgttatcagtatggtttactaggacactttaaaaaagattgtccaatgagaaagaagctgccccctcatccatgtccactatgccgaggcaatcgctagaaggtgcactgccccagaggacgaaggttccctgggtcagaaggcccaaccagatgatccaacaacaggactgagggtgcccggggcaagtgccagctcatgtcatcaccctcactgagccccgggtatgtttaactattgagggccaggaaattgacttcctcctggacactggcgcagccttctcagtgttactctcctgtcctggacgactgtcctcaaggtccgttaccatccgaggaatcctgggacagcctgtaaccaggtatttctcccacctcctcagttgtaattgggagactttgctcttttcacatgcctttcttgttatgcctgaaagtcccacaccgttattagggagggatatattagccaaggctggagctattatctacatgaatatggggaacaagttagccatttgttgtcccctacttgaggagggaatcaaccctgaagtctgggcattggaaggacaatttggaagggcaaaaaatgcccgcccagtccaaatcaggttaaaagatcccaccagttttccttatcaaaggcaatatcccttaaggcctgaagctcatacaggattacagaatattgttaaacatttgaaagctcaaggcttagtaaggaaatgcaggagtccctgaaacaccccaattctgggagtacaaaaaccaaacggtcagtggagtctagtgcaagatcttagactcattaatgaggcagtaattccactatatccagttgtacccaacccctataccctgctctctcaaataccagaggaagcagaatggttcacggttctggacctcaaggatgccttcttctgtattcccctgcactctgactcccagtttctctttgcttttgaggatcccacagaccacacgtcccaacttacatggatggtcttgccccaggggtttagggatagccttcatctgtttggtcaggcactggcccaagatctaagccacttctcaagtccaggcactctggttcttcaatatgtggatgatttacttttggctaccagttcggaagcctcgtgccagcaggctactctagatctcttgaactttctagctaatcaagggtacaaggtgtctaggtcgaaggcccagctttgcctacagcaggttaaatatctaggcctaatcttagccaaagggaccagggccctcagcaaggaacgaatacagcctatactggcttatcctcgccctaagacattaaaacatttgagggggttccttggaattaccggcttttgccgactatggatccctggatacagcgagatagccaggctcctctatactctaatcaaggaaacccagaaggcaaatactcatctagtcgaatgggaaccagaagcagaaacagcctttaaaaccttaaagcaggctctagtacaagctccagctttaaggcttcccacaggacagaacttctctttatatgtcacagagagagctgggataactctcggagtccttactcagactcgtgggacaatcccacaaccagtggcatacctaagtaaggaaattgatgtagtagcaaaaggctggcctcactgtttaagggtagttgcagcagtggccatcttagcatcagaggctatcaaaataatacaaggaaaggatctcactgtctggattactcatgatgtaaatggcatactaggtgccaaaggaagtttatggctatcagacagccacctacttagataccaggcactactccttgagggactggtgcttcaaatgcgcatatgcgtggccctcaaccctgccacttttctcccagaggatggggaaccaatcgagcatgactgccaacaaattatagtccagacttaggccgcccgagatgatctcttagaagtccccttaactaatcctgaccttaacctatataacgatggaagttcatttgtggagaatgggatacgaagggtaggttacaccatagttagtgatgtaaccatacttgaaagcaagcctcttcccccagggaccagtgcccagttagtggaactagtggcacttacctgagccttagaactgggaaagggaaaaagaataaatgtgtatacagatagcaagtatgcttatctaatcctacatgcccatgctacaatatggaaagagagggagttcctaacctctgggggaacccctattaaataccacaaggaaattatagagttattgcacacaatgcaaaaacacaaagaggtgggaatcttacactgacaaagccatcaaaatgggaaggagaggggagaacagcagcataagcagctggcagaggcagcagaaaggaaagaaagggacaggaagtcaaagaaagagacagagaagagacaaagaagtcagaaagaggaacagacacagaaagagagttaaaaagagaggaagagacaaagaagaagttgaagagaaagaaagagagatggaagtagtaaagaaaaaacagtataccctattcctttaaaagccagggtaaatttctatctacccagccaaggcatattctacttatgtggatcttcaacccgtatctacctctcaaacagtttgcaagaaataacaaaatctatccttactgtataatcccaaatagactctttggcagcagtgactctccaaaaccgccgaggcctagacctcctcactgctgagaaaggaggactctgcaccttcttaggggaagagtgttgtttttacactaaccagtcgggggtagcacaagatgccacccagcgtttacaggaaaaggcttctgaaatcagacaacgcctttcaaattcttataccagcctctggagttgggcaacatggcttctcccctttctaggtcctgtggcagccatcttgctgttactcgcctttgggccctgtatttttaaccttgtcaaattcgtttcctctagaatcgaggccatcaagctacagatggtcttacaaatggaaccccaaatgagttcaactaacaacttctactgaggactcctggaccgaccctctggcacttcccctggcctagagagttcccctctgaaggacactacaactgcagagccccttctttgcccctatccagcaggaaatagctagagcggtcattggccaaattcccaacagcatttggggtgtcctgtttagaggggggattgagaggtaacagcgtgctggcagtcctcacagccctcgctcactctcagcgcctctgcctgggctcccactttggcggcacttgaggagcccttcagcccaccactgcattgtgggagcccctttctgggctggccaaggccggagcccactccctcagcttgcagggaggtgtggagggagaggcgcaagcaggaaccggggcggcgtgccgcgcttgcgggccagccggagttccggttgggcatgggcttggcgggccccgcactcggagcagccagccccgggcaatgaggggcttagcacccaggccagcagctgcggagggtgtactgggtcccccagcagtgccagcccaccggcgctgctctcagtttctcactgggtcttagctgccttcccacagggcagggctcgggacctgcagcccgccatgcctgagcctcccaccccctccatgggcccctgtgcggcccgagcctccctgatgagtgccgccccctgctccacggcgcccagtcccatcaaccacccaagggctgaggagtgtgagcgcacggtgtgggactggcaggcagctccacctgcagcccaggtgtgggatccactgggtgaagccagctgggctcctgagtctggtggggacatggagaacctttatgtctagctcagggattgtaaatacaccaataggcactctgtatctagctcaaggtttgtaaatacaccaatcagcaccctgtgtctagctcagggtttgtgaatgcaccagtagacactctgtatctagctactctggtggggccttatagaacctttgtgtcgacactctgtatctagctaatctggtggggacgtggagaacctttgtgtctagctcagggattgtaaacgcaccaatcagcgccctgtcaaaacagaccactcggctctaccaatcagcaggacgtgggtggggccagataagagaataaaagcgggctgcccgagctagcagtggtaacccgcttgggtccccttccacactgtggaagctttgttctttagctctttgcaataaatcttgctactgctcactctttgggtccatactgtttttatgagctgtaacactccccgcaaaggtctgcagcttcactcctgaagccagcgagaccaggagcccaccaggaggaatgaacaactccagacacgccgcctcaagagctgtaacactcaccgcgaaggtctgcagcttcactcctgagccagcgagaccacaaacccaccagaaggaagaaactctgaacacatccgaacatcagaaggaacaaactccagacgcaccacctgaagagctgtaacactcactgcgagggtccgtggcttcattcctgaagtcagtgagaccaagaacccaccaattccggacacactaccaataaaaggaagaagataatatttttttaacaggagttttccatcatagtagattctttttttttttttttttttttgagagagtcgcactctgtcactcaggctggagtgcagtggcgcaatctctgctcactgcaacctccacccttcgagttcaagcgattctcctgcctcagcctcccgagtagctgggattacaggtgcctgcccccgtgcctggctaattttttgtatttttagtagagacggagtttcaccatcttggccaggctggtcttgcactcctgacatcatgatccacccgccttggcctcccaaagtgctgggattacaggcgtgagccaccatgcctgacccatcatagtagattcttaaggatgctttctacaaatgcattgtgctagttggatatcttttggcatgattgttacacgtttggcatggataacatacaggttaatgtcttcaaaaaggccaaccagataggcctactgaaccaaagagatagctattttcaaaacaccaatagctgtactctagatgtgccaatctattttgaagtcccaaacaatttctcacctcagacactggaagaaaatttgccaatcagaagttcaggggacttctgattaggacttattacagagtgcctcgcaaataggtctgtaattctgaggtttcttcacctatcctgtagaggacactctcttaggagcagctttttttttttttttttttttaataaattttggaaacaggattttactctgtcttctaggccgcagtgtagtggcgcaatcatagttcactgcagcctgcaactcctgagctcaagcaaccctcccaactcagcctcctgagtagctgggattacaggtgtgagcactgtgcttggtctcttatgagcaacttttgtaaccacttgcttactggatgctttacttccagttgatttatggacattgttgtgccttttatgagccatggtatagagacctccttacttactctcctcctttggctggagcttggcaagctagaggtggtgctggcactctataaccactttattttatggataaagaagtaagagcctagaaaaattatataatttgtccacagtggctaaagtgggactaaaacttatgagctcttttcactaaactactttaccactgttacctgaaatattttgggagtgtaatattatcaataatagactacttatttcctaacaactggttgttaatgataatgttaaattatagttaaattttgaagttaaatcactgttcgtcatggttgctaatatttgatgtaatgccttaggacaaattttcctacctaggtgtcttagtcaaagtagtgtggactgggtacttagttctagagtctgggaagtccgtgtccttaatagtgcctgcagatggttgtcttctcattgtaacttacatgttatgtgtaactcacatgccaatgttctcacatggcagagaacagaaagatagatcctgtgtctcctcttttttaatttttaattaattaattttttttttgagacagagtctcactcacccaggctggagtgcagtggtgtgatatcagctcactgcaacctccgcttcttgggttcaagtgattctcctgcctcagcctcccaagtagctgggattacaggcacacaccaccaagcccagctaattttttgtatttttagtagagacagggtttcgccatgttggccagcctggtctcaaactccttacctcaaatcctcaagtgatccacccaccttggcctccactttacagacatgagccaccatgcctggccttttgttttgttttgttttgtttttttataagggcccaaacccattcatgagggctctaccctcattatataattaccttccaaaggttctacctccatatactgtcacgttggggatttaggcttcaacatacgaatttgcagggcacatattctgtccataggccgggtgcggtggctcacacctgtaatcccagcagtttgggaggccgaggcgggtggattacgaggtcaggagtttgagaccagcctgaccaacatggtgaaaccctgtctctactaaaaatacaaaaaattagttgggcgtggtggcatgtgcctgtaatcccagctacttgggaggctgaggcaggagaatcgcttgaacccagaaggcagaggttgcagtgagctgagatcgcgccactgctctccagcctgggtgacaagagcgaaactctgtctcaaaaaacaataacagcaaaaaaattagccgggcatagtggcgtgcacctgtaatcccagctactcgggaggctgaggcaggagaattgctagagcctgggaggcgaaggttgtagtgacccgagatcgtgccattggactccagtgtgtgcaagagagtgagactctgccttaaaaaaaaaaaaaaaaaaaaggaattcattaaatgttcagctgtttcttcctcctcacatgtacagtggtgtcctcctccactcactgctttacctaggataagagcagccttgggtctcttcactcttggaagagtcttttcatattctacttttaaatccatttagtttccttttgtccttagatcttatttttaaagaaaaggttatgatttttaggttttctgacttgttatcagggaagtgttttggcttgttactaagatgggaataaaattctttgcatctttgtatactctaagcagaagtgggagtcactttttttcacattggtcgagacagcatcttgctctgtcacccagactggagtgtggtaacacaattatggctcactgcatcctcgaactgctgggcatgagcagtcctcctgcctcagcctcccaagtaactgggactataggcatgcactaccacacccagctaattttttattttttgtagagacaaagtcttgctctatcacccaggctgatctcaagctcctggcctaaagcggttctcccagcttagcctcccaaaatgctgagatcacaggcatgaactactgttgcctggccttttttcatcttttttttttttttcctgagatggagtttcactcttgttgcccatgctggagtgcaatggcgccatctcggctcactgcagcctctgcctcccgggttcaagcgattctcctgcctcagcctcatgagtagctgggattacaggcatgtgccaccatgcccggctaatttttgtatttttagtagagacagggttttaccatgttggctaggctggtctcgagctcctgacctcaggtgatccacccgcctcagcctcccaaagtgctgggattataggtgtgagccactgtgcctgtccccttttacacattttaacatatgtgatatgataagtcattttatcttatctaaaaagctgtcatttgaggctattattattattattattattattattattattattattatttttgagtctcagtctgtcacccaggctggagtgcagtggtgtgatcttggcttactgcaaccttcgcctcctaggttcaagcgattcttctgcctcagcctcctgaatagctgggattacaggcacgcaccaccacacctggctaatttttgtatttttagtagagatggggtttcaccatgttggtcaggctagtctcaaactcctgacctcgtgatccacccgcctgggtctcccaaagtgctgggattacaggcgtgagccactgcacccagctgagtctattatttccttatcaccaagaaaaagaaataccatcaagtaattttacaatgccacaaatatgatatatcccactgtaggagattttaaggtgtgatcaatgtatgtattaaaattgatgaaatatgggagttgtcacctatgtaaatgtgaacttgattgttaactctggcagaatgtccactcagcagcaacccttcagtgtttctgtcaacaaaccatatgagaagtcagatgagttgtattgtttgaaaatgtttcattggataacaaaatgttgatggttgctaacgcttagtgatgggcatttggaatttgtatgtacactccacttctgtatatagtagtaagttttttataataaaaagattaaaactagaacaagcaaccttccattggcactttctggcatgatcaagaaagcatctgcattaaaattttcagtgtcgtgttagtggatggaaagaaaattccagagacaaaagtcaaaagaatgttttaaagaaatgttgggttatgatctcagtgatgtttttaatgacacataaggtagaaatgtatggaaaaataggacacagttgacaaatttgaaaagatattcagaagaatctaactctaaatatgaaaaagttttaggaatacctacaccaatttattttgcatctgtttttctttttacaggctgtatgagagtgattttaataatctctgtccaaataagtctaaaggagcttatcaagaagtaaagcataacattctaggggataagtcatagttggtcgtagtttaagcagcatactttttagtatctcttattttgaataaaaaaaaattaagtaccatgtatatagttaatcatttttagtgtttccaagatactgcttttcttcataggctataaaaagcttttgttgcttatattagtaacaaaaacaattttgcaaatggaaacatttctagaaaccttactatttatattagtattatataaatttatccaatttccagaaatttgggtaatgctaaaatcactttccaacaactaagactaggaaaattgtcatttctattttgtaataaaagcttgataaaatacacattagttagctatatgcaatgttctcataatttagtaaaagcaaaaaaaagcctagaaagctaaatcttagtggaaaaatctttattattaaattttcaaatgtactaattctgtgctttttatgtacaacttttggtttttcaggtttttccaaaatctaacctttgttacattaaaattttaatattttatttaattggtaatgtcctttaaataacattaatctaaattttcaatactgaaatttaaacatgtccacatatttaagaattaaaaattagatttttaaaaaataaaattagattccttatcacttctcattcctagttgaattcaaaatacatttttcaaataagtaatatggttcagttcttttgggaattataacattggatatcttaactcatttccagagacagttttatctgtaatgccatattaatattacatttaatatttaattttattttttatacagaagacaagataatctttattaactcatatttacttgaattacacaagaatgtaagaacacatttaaatattcagtgtttctcatttggatgtggcaaaactttgtttcacgttagactacgaatttttttattgtaacaaatatttaaagaaataccagtttttggctgggcgcggtggcttatgcctataatcccagcactttgggaggccaaggtgggcagatcacgaggtcaggagttcgagaccagcctgaccaacatggtgaaaccctgtctgtactaaaaaatacaaaaattagctgggtgtggtggcgcgtgcctgtaatcccgctacttaggagtctgaggcagaaaaatcacttgaacccaggtggcggaggttgcagtgagctgagatcgtacatctgtgacatggataatattcagtgataaaaggaaatgaactgctaagccacaaaaagacatggaggaacctaaagtacatattgctaagtgaaagaaggcagtctgaaaagtctgtatattgtatcattccaactatatgactttctggaaaggaaaaactataggcacataaaatatccttgtatagtcatgaatctataaattatttagttttgtgtgtgtgtatgtgtatgtattgaaaatagtttatcttttaggtttagcaaattctaaaatgaggttttttttgtttttttttgtttatttgtttgtttgcttttgagacggagtcttgctttctcacccaggctggagtgcaatggcatgatcttggctcactacaatctctgcctcctgggttcaagtgattctcctgcctgagcctcctgagtagctgggattacaggcaagcgccaccatgcccagctaatttttgtctttttagtagagctgtggtttcaccatgttggtcaggctggtctcaaacccctgaccttgtgatccgtctgcctcagcctcccaacgtgttgggatgacaggagtgagccaccgcacctggctttagttttttttttttttttttgattgaagtaaaattcacataacttagaattagtcatattaaaatgtaccactcaacacattcatagtgttgtgcaactattacctctgtctagttccaaaacattttcatcaccccacaagggaaaccctgtatctaataagcagtcactccctatttcttcctctcccagtccctggcaactactaacctgctttctgtctatgaatttggcctattctgagtatttcatttcaatggaatcatagaatattcaaccttttgtaaatcctttgtaggaatataccacattttgtttatccattcatcagttcatgaacatttgtgttgtttccactttcgggtgttgtaaatagtgatgctgtgaacatgcatgtagaagtttttgtttgaacacttgtttttggttctttctgatatatgcctaggattggaattgctgggtcttatggtaattccatgtttaactttttgaggaactcacaaactgttttctactgtatacttaccatttcatatcccacttgcaatgtacaagagttataatttatccacatccttgccagcgctttttattttctttttttttaattgtagccatgccaatgtatgtgaaataatatctcactgtggtaaaatgagttttatatgtagcttttctgcctgtaacttactctgtatgttaaaaggaggcacaatgatcaatgtgttaaaatctattaatatctgaaaaatgggctgggcacagtgactcacacctgtaatcccagcactttgggaggccaaagtgggcacatcaacttgaggccaggagttcaagaccgatctggttaacatggtgaaaccccatctctactaaaaatacaaaaaattatccaggtgtggtgctacaaacctataatcccagcaactcaggaggctgaggcacaagaattgcttgagtctgggatgtggagtttgcagtgagctgagattgcaccactgagctccagcctgggcgacagagcaagactctcttaaaaaaaaaaaaagaaagaaagaaaaaagaaaatataataaatggtctgcaaattaagagtatttcagtgttgtttcaacatatccttctatagaaatatagtttagacattttaataagcaacttctacttaatttgattgagacaaataaattcattaaaacaggaatgcccattagaggaactctttgccgtagaggcatcctactttgccatagaagcttctaatttgagtataatatgcttgattttgattgaatataaagaatgaataaagatgctggcagtcatcaagcgcagcttctgatcagtattaccaaacattgcataactacatctagttaaacaatgaacagctctttcatagggcaactcattctgttttagacaggtctgtttataagccatgcttttctgtatgctcaactaaaggctcttatccttgaagatacactgattggaactggttatttgatgtgaagacagctatcatatcctcccaagttttcttttttttcctcatcagatgctttcagttctttctacccatcacagttcagaggtctcaaaccttcatagttgtacttgctctcttttggatatgctctagtttgtggccatccatcctaaagggtatttgctctagatgcgatctgacccacagaatggaacttaacacataaaatgtttacatgtttgtgatagccctgtgatttacctatgtgtgttcccattccattctgcaagtgagtaaacttgggctcagataggagaagaaactttcctaaggtcatatgttaagtggaagaagtgagcttcaagtcctattcagatttaactgcctccaaagccatgctattttcattaataaaaataccaatattgataagtgtaactaccatttattgcgtagataatatatgcttttttaaaaaaaaactttaattttttttttttttttaaagaaacagagtctcacttcatcacccaagctggagtacagtgatacaatcatggctcactgcagcctcaaactcctgggcccaagcaatcctcctgccatagccccctgagtagctgggactacaggtgcatgccaccatgcctgactaatttttttttttaatttgttttaatgtctggcattttgctatgttgtccaggctggccttgaccttgtggcctcaagtgatcctcctgcagcagcctcccaaagtgttgggattataggcatgagccactgtgcccagccagataatatattcttgacgttgtgttaagtacttagactaccatctaaatcttacagctaacttgggaaatacagagtactatttttataaatgaggaaattgaggatttaaaaccaaatgtgattctaaaactgttagattctaagactcttgatattatactatcctgtctaatctgtttcatggtattgttgatgttttaataattaggagcacatctacttggtgttttagtgttccaaatctatacagaatagtctgtatgattaaaaaatataatttgtaattatcacatttattactaattttttctttcatttcctttgatgcaaaaacattactaatttgattatacatgggtacagcctttctaaagggcagtctgtcagtatttaacaaaatacttttttaaaaaaaaatgacatttcaaaatttgttttcttttaggtccacctcattcatttaaccgagatgagacaataatcattgctttggcatcagtctctgtattagctgttttgatagttgccttatgctttggatacagaatgttgacaggtaaaaattaccattttttgtcctattgtttattaaacatgcaatttaatcaatttatttgctccttttaaattccgtatgttaaaaaaaatagtctcaaagttatgcaaaatacacccagcctcaatagtatcacgtatggacagtattgtttcatttaaattatcagtcactacccctttccatgccactggattattttgaagcaaatcacagatatcatatatctgtaaatatttaattagatattatatatctataaatattatctctacaatacaagagctttttttaaaatttattttattttattttattttatttttgagacggagtctcgctgtcgcccaggttggagtgcagtggcgcgatctcggctcactgcaggctccgccccccagggttcacgccattctcctgcctcagcctcctgagtagctgggactacaggtgcccacctcctcgcccggctaattttttgtatttttagtagagacggggtttcaccgtgttagccaggatggtctcgatctcctgacctcgtgatccgcccgccttggcctcccaaagtgctgggattacaggcgtgagccactgcgtccggccaatacaagagctttaagaatacatatccataataccattttcacatctgaaaaaataacagtaattcctcagtatcatcaaatgtcaagttggttctaatatactttaggtttgatggactgtttaggaaatcagcgttcattgattcatttgaataacttctatacaatcttctttaaagtttttataatattgcttagggttttaaacttttaaagtaagtcatcatgggagtgtctcccagaatttggctttcatgctattctgcattcatcttaatttataggtattacctagtttagtaaatagctttactcctattgacattaggcataaatcttgctgctaatctttctgcagctcttctttttaagtgtaatattataaaaagtgtaaaaagatattcattttaagaaaaccatatattagtaacctgtttcctgttcttataggagaccgtaaacaaggtcttcacagtatgaacatgatggaggcagcagcatccgaaccctctcttgatctagataatctgaaactgttggaggtaagtttgccgttagattatggactgttgtttctactgtgatactagacctggaacagtgacttcattcaatcattaagacattcattcatttatttaaccctatttactaaattacaattttttgtcaaggcctattctaggcactaggaacataggtgaacaatgtctcctggggcttctatttgaattggggagtctacagacaggtacaggaatgtataatataattgcaagtagtagtaagtgctatgaagaaaagtacagtggataagaaagtgatgaaaagggggttattaaagaaaatatgggccaggcgcagtggctcatgcctgtaatcccagtactttgggaggttgaagctggtggatcacctgagatcaggagttcaagaccagcctgaccaacatgaagaaaccctgtctctgctaaaaatacaaaattagccaggcatggtggttcatgcctgtaatcccagctactcaggaggctgaggcaggagaattgcttgaacccgggaggcagaggttgcggtgagccgagatcgcaccattgcactctagcctgggcaacaagagcgaaactctgccacaaaaaaaaaaaaaagaaagaaagaaaaagaaaatatggccaggtgcagtggctcacgcctgtaatcctatcactttgggaggctgaggcagggggatcacttgaggtcaggagttcaagaccagcctggccaacatggtgaaaccctatctctactaaaatacaaaaattaactgggagtggtggcgcccgcctgtagtcccagctgcttgggaggctgaggctagcgaattgcttgaacccagaaggtggaggttgcaatgagccaagatcacgccactgcactctaggtgacagagcaggaatccgtctcaaaaaataaaaaagaaaaagaaaatatatttagaaagaggttgacctttgattagagatttgtacagggtatgagaataaagacatgaaagtttgagaagagtgtgccacaagggatccataatagacaacaaataaatactccttgtctgcatatattacatatttttatagatacataaggctcttttatatagaatttaagtttcatttggtgatatctcagaagctacattaaaagtgttaccatgatgagtgtttttatatttattaagaatgacttgaaaactatggtccccaaaccagagactattaaataatagatgtgatagatttgactatataaaaaattgtaagaactttctgttttgggagagacataccataaacaaagataaaagccaaatttgaaaaataaatttcaacatttcaacatataagggaaaacttgataaagaactgatataaatcaagatgaaagaaacattctatagcaaatggacaaaaaggctgagtgctgtgactcacacctgtaatcccagctcttttgggaggccaaagtgggtggattgcttgagcccaggagttcaagacaagtcatgggcaacatggtgaaaccccatttattttgtaaaaaatacaaaaattagctgggtgtggtggcacatgcctgtagtcccagctactcgggaggctgaggttgaaggatcacttgagcccaagaggtagaggttgtggttagcctaggtgacagagaccctgtctcaaaaaaaaaaggacaaaaggtattaactgccaattcacaaaagaagtaagtgtggctaagaaatgtacagtaagatgtccaatttacaaggctgaaagaaatactagttaacccatggaattttagccatgattaagtgatagaaacacttccaaacattgctgaattaactatatattgatataacctttttaaaggacactttgtataattttgatctggaaacagtgtatgaaacacaacatatatccttaaataaatgatggtaaatccccaacctgttttaataaaaagtaaaagcaatccccagaagccaaaaataacgagaatgggttacattttgctggttctttgggtgttgagtaatttttttgtattctggatattgtgaatattgtattgtggaacactgaactcaaaaattagctgggtatcatggcacgcgcctgtaatcctagctactcaggaggctgaggcaggagaatcacttgaacccgggaaacggaggttgcagtgagctgagaccgtgccactgcactccagcctgagtgaaagagcaagactatctcaattaaaaaaaaaaaaaaagatttttttttgttgttttagtaagcaataaacttggttgaacacataccacaaatctgtttggggcagaagctcaaatctcagttcagttattttatctttttttttttttttttactctgtcatccaggctggagtgcaaggcatggtctggggtcaccgcaacctctgcctcccggtttcaagtgattctccagcctcagcctctatgtagggatctttatgcaagtatttaagtctccacaaaagtgactacaggcgcatgccaccacgcccagctaatttttgtatttctagtagagatggggttttactgtgttggccaggctggtctcaaactcctgacctcgtgatccacccgcctcagcctcccaaagtgctgggattacaggcgtgagccaccacgcccggcctcagttattttatctttagctggaaactctcttgtatattcactgggctttcctctctctgaatttctcctttctagggttctcccctcattttctagcaactgtggctgtccaaaatatgtcctgagtttcccaaggccagaacaattttctgttcttcttttttcttttttttttttttgagacggagtctcactcggtcacccagtctggagtgcagtggcgcgacctcggctcactgcaagctctgcctcccaggttcacgccattctcctgcctcagcctcctgagtaagtgggactacaggcgcccaccaccacgcctgactttttttttttttttttttttgtatttttttagtagagatggggttttaccgtgttagccaggatggtctcgatctcctgacctcatgatccacccacctcagcctcccaaagggctgggattacaggcgtgagccaccgcgcctggcctcttttttttttttttttttttttttttaattgagacagtcttgctctttcgcccaggctggagtgcagtggcgcggtctcagctcactgcaacctccgtttcctgggttcaagtgattctcctgcctcagcctcctgagtagctaggattacaggcgtgtgccatgatacccggctaatttttgtatttttagtagagacagggtttcaccactttggccaggctggtctcgaactcctgacctcaagtgatctgcccacctcagcctcccaaagtgctgagattacaggcatgagccaccacacccagcctagaatggttttctttagcaattttagttccactgcacagtgctgatttcagcctgccctcaggataaaagtcataaaaatgggtagcttgccccataccacttttttctcaaagctttaatgcctctcaagatctatctgcctttagatctttcttttttttaaattttgtccagcatttataaatgttctctatgggcaggctgggtctggtaggagcttcatcagccatactagaacagaatttattaatttcttgataatggaataaactgtaagcaacagagagctgtagcattctgtttaaatttgtactttattatttagtaaatttgattgttcaattgtgatattaataccttgctttctttaaaacacttgcagctgattggccgaggtcgatatggagcagtatataaaggctccttggatgagcgtccagttgctgtaaaagtgttttcctttgcaaaccgtcagaattttatcaacgaaaagaacatttacagagtgcctttgatggaacatgacaacattgcccgctttatagttggagatgagagagtcactgcagatggacgcatggaatatttgcttgtgatggagtactatcccaatgtaagttcttcatagaaaataaactgaggccaggtgtggtggcttatgcctgtaatcccagcacttttggaggctaaggcaggtggatcacttgaggccaagagttcaggaccagcctcgccaacatggcaaaactcccgtctctactaaaaatacaaaaattagccgggtatgatggcacacatctgtaattccagctacttgggaggctgaggcatgagaattgcttgaacccggtaggcggaggttgcagggagccgagattgtacagccgtactccagcctgggcgacagagcaagacgcaatctcaaaaaataaaaaaaaataaactgacatttatattagttgttaatcagacttcagagaggaccactgtattacagatagagcattgctgactcacaaactggattattaatggtctgcaatgaaataaggatctcacaccagaatgtgaatcaactaattatactgtttgtttcgctgtctcctccttctttctgtttttctcttctttatttaattttttgataacaagttttttgatgaaagaagcagtactttgattgacattcattctgatgcaacattcttttctcatcagcaactggtaatagtttgtagataagcactttgagtggcaccaatacataaatgaatatatttacaaaatccttttgttttctacttattaaccataacaatataatttgtattcatactggtgaatgatacacttttctatcttaatttgatcaaagaattgtttaaaaggaaataatcattcataatttttaatattagagacataaaaatttataatgtttaaattcccctttccatcccttcctctcctctctacacacagaaatgtcatactaactctttcaagattctgaaatgtagtagttcattagatcttcatggaatcctagcctatttgcaaattctttataaggatgctaatttactcttcatgttaaagtgagttaattctaccttttttttttttcgcattttttcctctatatagggatctttatgcaagtatttaagtctccacacaagtgactgggtaagctcttgccgtcttgctcattctgttactagaggactggcttatcttcacacagaattaccacgaggaggtaagatagtcaatagatgaaattgacactcatgtgggttcaaaattcacaacaggaaattttaattatatcttcaaagtaaaagtataatttatattattggagatttattattagtcagttgtttgaaagattcagcatgaaatgcatttgaaatgtaacagaaagagctttcccacgcagctgccaagatggcagaggggcagtcctggtgcttgatagctgagtaaaactcctgggctacctggaggctatcatgacccagcagagaaagtagtggtcatgtcctgtgaggacatcaacatttctggcagtttctacagaaacaagttaaagtatctagccttcctctgcaagcggacaagcaccaacccttcccaaggaccctaccatttatgggtccccagccacatcttttggcagaccacctgcggtaggctgccccacaagaccaagcaaggctaggctgccctagatcacctcaaggtgtttgatagaatccccctgccatatgacaagaaaaagcagatggcggtttctgccaccctcgaggttgtacgtccgaagccttgaagaaagtttgcctacctggggcactgggctcagaaggttgactggaaataccaggcaatgacagccaccatgggggagaagaggaaggtctattatcagaagatctgttaccagaagaaaaacagctcatgaggctataggaaaaggctgaaaagaacatagagaagaacattgacaaatacacgaaggtcctcaaggcccacagactcctagtctgagtccaataaagactgtttattcctcatgcttgtcctggcctgctcttcctccattgttgccatggggatgtaggggacccaggggcagcagtccaggtgctctaggcagcctgggacttacaaagctggagataaggaatgaatcttagtcactgtctttctattaggttactttaaacaactctaaaagttgtgcagacataatttgtctatgatgtacttgtttgcaagagagtttcataaaatcattagtaaaaacaacctgctacttcagttggaatattggcagcccgggcgtgattgatggctcatgcctgtaactctgacactttgggagaccaaggcaggtggattgcttgagctcgggagtttgagaccagcctgggtaacatggtgaaaccctgtctctacaaaaaatataaacattagctggacgtggtggcatgcacctgtagtcgcagctacttgggaggctgagctgggaggattgtttgagcctgggaggtgaaggttctagttagctgaaatcacaccactgtattccagcctggctgacagctagactgtctcagaaaaaaaaaaaaagcaaatgtgaactggaacactaattgaagagtttccctaccttgtgaatggggaatctgtttgtatttcctaccttgtcatatactgtactctgcagctgttaggatgtgagaaaatgcctgtggggacagtatgagcctggtgttgtacagggtatttatggatgtgtaggctaggaagatatgcaaccaagggattacagccattgcattctcttccctgtactttgtgatgagaaacaaataaattaattttaaagaaaaaaatataacaggaagaataagagaaagaactttggctggcatggtgactcatggctgtaatcccaacactttgaaaggccaagtggatctcaaggatcacttgagcacaggagtttgagaccagcatgggcaacaaagtgggaccctttctctacaaaatataaaaaagttagccagatgtggtgacacgcgcacataatctgagctacttggatggctgaggtgggaggattgcttgagtccaggaggtctaggctgtagtgagctgtgttcaccccactgcactccagcctgagtgacagagtgagaccctgtctcaaaaaaacaaaaaaacgaaagaaaaagaacttcaagacttacagggaccattaagaatttaattcttggccgggcacggtggctcacgcctataatcccagcactttgggaggccgaggtgggcggatcacaaggtcaggagtttgagaccagcctgaccaacatggtgaaaccccgtctctactaaaaatacaaaaaattagccaggcatggtggcacgcttctgtattcccagctactgaggaggctgaggcaggagaatcgtttgaacctgggaggcagaggttgcaatgagccgagatcacgccactgcactccagcctgggtgacagagcgagactccctctcaaaaaaaaaaaaaagaaattcttgtccattaataatttctgagttgggtgcagtgactcacatctataatccgaacaatttgggaggccgaggcaggtggactgcttgagcccaagggttcaaaaccagcctagacaacatagtcagacccccatctctacaaaaaaagttttaatcagctggaggtggtggcacacacctgtggtcccacctactcaggaggctgaggtgggaggatagcttgagcctaggaattctaattgcaatgagctatgatcatgccactgcacttcagcctgggtgacagagtgagacatcgtctaaaaaaaaaaagaaaaatgaattccttttcatactctgaacattcttcctctaagatatacatgcgagcatacttagaaaatgttcttttcaaaagaaactatccacggagtaaacaacctacaaatgagagaaaatatttgcaaacttcacgtccaacaaaggtctaatatccagaatgtataaggaacttaaacaattgaacaagcaaaaaacaaatagccacattgaaaagtggacaaatgacatgaatagacacttcccaaaagatgacatacaagcagccaacaaatatatgaaaaaatgctccatatcactaatcatcagagaaatgcaaatcaaaaccacaatgatatactatcttacaacagtcagaatggctgttaatgaaaagtcaaaaaacaacggatgctgttgagactggagaaagcggaacacttatacattattggtgggagtataaattagttcagccactgtggaaagtagtttggagattcctcaaagaactttaaacagaaataccatttgacccagcaatcctattactgggtatatatccaaaagaaagcaaataattctaccagagagacacaggtcttctgtttttcacagcactatccacaatagcaaagatacggaatcaacctacttgtctgtcagtggtggactggatataaaaaatgtgttaaatggccggacgtggtggattacgcctgtaatcccagcactttgggaggctgaggtgggcggatcacctgaggtcgggagttcaagaccagcctgagtcaacatggagaaaccccatctctactaaaaatacaaaattagccgggggtggtggtgcatgcctgtaatcccagctactcgggaggctgaggcaggagaatctcttgaacgtgggaggcagaagttgcggtgagccaagatcgtgccattgcactccagcctgggcagcaagagtgaaactccatctcaaaaagaaaaaagaaaaagaaaatgtgttacacatacaccatcgagtactacacagccataaaaatgaatgaaatcatatcctttgcagcaacatggatggagctggagtaggttatgctaagtaggaatagaaaaccaaataccacattttctcactttataagtgggacgtaaacatcgggtactcatggacatgaagatgacagcagtagaaactagggactactagagtggggagagagggagaggggcaagggctaaaaactaactgttggggccggacgcggtggctcacgcctgtaatcccagcactttggggggctgaggcaggcggatcacgaggtcaggagatcaagaccatcctggctaacacagtgaaaccctgtctctactaaaaatgcaaaaaattagtcgggtgtggtggtgggcgcctgtagtcccagctactcgcgaggctgaggcaggagaatgccatgaacccggtacgcggggcttgcagtgagccgagatcgcgccactgcactccagcctgggcgacagatcgagagtctgtctcaaaaaaaaaaaaaaaacaactacctgttgggtactatgctcattacacgaataacaggatcatttgtacctcaaacctcagcatcatactataaacccagataacaaacttgcacatgtacccctgagtttaaaataaaagaggccaggtaccatggctcacacctgaaatcccaacactttgggaggctgagacgggcagagagcccaagagttcaagaccaacatggtgaaaccctgtctctgcaatagccaggcatagtagcatgcatctcaggagggtaaggtgagaagattgtttgagcccgggaggcggaggttacagtgagccaagatctcgccactgcactccagcctgggcagcagaccaagactgtgtctgaaaaataaggctaggtgcggtggctcacgcctgtaatcgcaacactttgggaggccaaggcaggtggatcacctgaggtcaggagtacgagaccagcctggccaacatggtgaaaccccatctctactaaaaatatcaaaaaaaaaaaattagccaggcatggtggcaggtgcctgtaatcccaggtgcttgggaggctgaggcaggagaatcaacaagagcgaaactccatctcagaaaagtaaataaataaaagaaaaaaatgttcttttgattctagggcattttcagactttttaaagcccatttttggatcttaggttaagaacctcttagctaggctatattatattttccttgtattaattttgtttaagtgaactacaatgcatcattaatttttttaatttttaatttttgtgggtacatagtagtgtatatatttatgaggtacgtgagttttgttgttgttgttttttgttttttttgagatgagtctcgctctgttccccaggctggagtgcaatggcgcaatctcagttcactgcaacctctgcctccctggttcaagcaattctcctgcctcagtctcccaagcattacaggcatgcacccagctaatttttgtatttttagtagaggtggggtttcaccatgttggccaagatggtctcgatctcctgacctcaggtgagccgcccacctctgcctcccaaagtgctgggattacaggcatgagccagcgcacctggctggctttcattttcaaagtcacctcattgtccatcatgccagtcagggaaaagtaagggaaggtaaaaggaattgtccctttctgtctccataagtcccactcctatgcttgtttgtttcccagaacctagtgcacacttagctccaaaagaggctggtaatatagttgttgttgatgttgttgtttcctgcttgtattgctgcctcaaataatattgggttctgttactaggtaggaagagaagaatacattgtggggatcagcctttgctcgtgtttcagagctatgtagttatattccctgttgtaactgtggtcttcctcacctttcatgcatatttttgctagttgttcagagcatctttttttttttttttttttttttttgagacggagtttagctcttgctgctcaggctggagtgcaatggtgcgatctcagctcactgcaacctccgcctcccgggttcaagcaattctcctgcctcagcctcccgagtagctgggattacaggcatgcaccaccacgcccagctaattttgtatttttagtagagatggggtttctccatgttgactcaggctggtcttgaactcctgacctcaggtgatctgcccacctcagcctcccaaagtgctaggattacaggtgtgagccacagcacccagcctggagcatctctttaatacgtttgctttctcactttgtttcaatatacacctcacctcatagataccccaaagttacctttgctataattgtgtctttgtgctttcttctaccctcatcccttgctacatttccttgtcatattatagccctgacattattttttcagtctctctgacatctttagtgaagagaactttaatatatcagttttcttagatctttgtttcattgtatattagcatggatcatcttttctagctgatgcttcatgtataaataatttctcctgaataatttatccgttcatttatcttgacatcttgcttctcctaaatacagaattgtccaaagtattgcctgtgtcagcaacttgatgcacttgctgtagtgctttagcacattaaccattggactgtgtccacttagctcttcaatattatactgcctttaaaaagttggcttagcacagaacttaaaataccatcctaatctcccttttcaagacttgcataatttagcaaggtttcaagtcaaatgtaggctgaaaagaatgattgccatcagatataagttttatttaaacagagctgttactctgaaacattagctaatgttaccactaaataagggtaatacctttttaaaaactaagtacatagatgctgctattgcatataaatatagtagctatttgaatttatgggatttttcttttttttggagtctcactctgttgcccagggtggagggcaatggcataatgttggctcactgcaacctccgcctcctggattcaagcgattctcctgcctcagcctcccaagtagctgggattacagacgtccaccaccatgctgggctaattttttgtattttagtagagacaaggtttcaccatattggccagggtggtctcaaactcctgacctcaggtgatccacctgcctcgacctccaaaagagctgggattacaggcatgagccactgtgcctgcccagaatttatgttttttacctgattatttaaaaaatattccctggccaaatgcagtggctcaaggctgtaatcccagcactttgggaggccgaggtgggtggatcgtgaggtcaagaaatcgaaaccattctggccaacatgtgaaaccctgtctctactaaaaatacaaaaaaaattagctgggcgtggtggcgtgcgcctgtagtcccagctactcggtaggctgaggcagaagaatcgcttgaacctgggaggcagaggttgcagtgagctgagattgccgccactgcactccagcctgggcgacggagcaagactccatctcaaaaataaataaataggccgggcgcggtggctcacgcctgtaatcccagcactttgggaggccgaggcgggtggatcatgaggtcaggagatcgagaccatcctggctaacaaggtgaaaccccgtctctactaaaaatacaaaaaaaattagccgggcgcggtggcgggcgcctgtagtcccagctactcgggaggctgaggcaggagaatggcgtgaacccgggaagcggagcttgcagtgagccgacattgcgccactgcagtcggcagtccggcctgggcgacagagcgagactccatctcaaaaaaaaataataataaaaaaataaataaataaataaaaaatattcccaagtacagatgtttcttgacttacaatgggattacatcccaatgaactgattataaattggctgggcatggtagttcatccctgtaatcccagcactttaggaggctgaggcaggagaatcaaactcctgagctcagaagtttgagactagcctcggcaacatagtgagaccccgtctctacaaaaataaaaaaattagctggctgtggtggcatgcacctgtagtcccagctatttaggaggctgaggtgggaggattgcctgagcccaggaggtcaagactgcagtgagccaagatcatgccactgcactccagcctgagcaacagaacgagaccctgtttttatttatttatttacttttgagatggagtctcgctctgtcgcccaggctgtagtacaatggcgtgatctcggctcactgcaagctctgcctcccggcttcatgccattctcctgcctcagcctccagagtagctgggactacaggcacccgccaccacgccgagctgattttttgtatttttagtagagacagggtttcactgtgttggccaggatggtctcgatctcctgacctcgtgatccacccgcctcagcctccccaagtgctgggattacaggcgtgagccagcacgcctggccagagaccctgttttaaaaaaatgaaagaaagaaaagaaaaaagatcataagttagaaatattgtaagttgaaaatgcatttaatacatttaacctactgaacatcatagcttagcctaaactatcttaaatatgctcagaacacttacattagcctacagttggccaaatcatccaatacaaagtctactttataataaaggattgaatatctcatgtgatttattgaacactgttctgaaagtgataaaaaggaatgaagtatggtttctactgattgtttactgctttcccaccactgtaaagttgagaaatcataaatcaaaccatctgtaagtgaaagatcatctgtatgcctatactatactatttttacttgaagtgctctttcactgaattctatccttcccagcatcttcagatataactttgttatttggagtagaaatttggtagtaaggaattatactgttattacttattcagctgtttgttgcttccgaataaggaagaattgaacctatttatttatttgtaataagatctccctatgaattttttccatattataatagcaacgcatgcttattaccaaagaaatatctgaccaaaaaaatagatatagacaactcagacttcaccagaaaattactgttaagtagtttgtatatagtctttcatgtccttgggagggcagggggatagcactggtgataatatgtataaatatccatagattgactatttttggtcaggttttaaaaatacatataactaatatcttgttgtgctttcctttgagatatttgcctactgcagtgttctgcccagggcaaaattattgtatgttccaccctccctccatacccaaataaagaaaattaaaatgagtacagaggggagtttaaaagggaaaacttttctcaaaagggcagtctatagttctgcccattgatttggtattattatataaatatattccaatgtttccatgagttttcctatataaatattagctcaagattgtacgacatatatttatgttgtggctttatccagagtaagaaatgcagctcttgcaggaattgagtaggagccaagttaatacaagctttggaagactggagaacaggaagtgggtaagggaggaaatgagaaagaaatcaactcttaggtgaagaaattggtaactcctattttttcttcaaattgtactgttgcttaatttttttaaatcaatgattattataattatctatagtttcattattggtgaaattgcatttgaatgctcattaatgagcgtaatacatctgaatactgagtctatttgtgccaaaatacaaatcctcagtaaatgtattgactttgttctgattgctttgtttttctctatacctaagcagatattttaaatttcagaaattgtgctatagaattttttttcagttccagagctatggttttatttaatacaaggtttatataagatttccttatagagaagaaaaatataatgtacttatatttggtgagaggcttaggttagattcattctttcagtcagcaatcatttactgtgtgtctactctgtgccaagccttttaaagtcaggtgaaagatgttctctttctgccttcatggagcctgtagtcctatgataaggataaaaaagtaatagaaggagcataatactactttgcttctgtaaaatcagaaaaacaagttttcatatcttggtgagagataccacttcctccacttgtttttccaaaccattgtaaaactatttgtggttagatttgaaaagctgaggtgggcttagagatatggctaaacctcagggcagaactggaatgtgctgtcacagatttgatctgttaagccataggagagcagtttaagatttacgttaaaattttggagctccattagtttttcactgatacttattttagacaagcagactttttttttttgatgtttataccaaatattcctttctgtattgcctccttttacagccctatactataaatgaagagaaaaaacaagtgcgtgttagaatctgaagtggcagcatgtttgttagttttagttaatgtttaactatacatgcaacaggagttatattataaaatatattagaaaatagtgatgagtgtgagttgaaattccgatttctctttttttgttattagaaaattaatgggcagaaaaataatactacttctatatttatgtatgttcatttcatgttcaatagtcccttttattcattgataaatatttgaaattatccaaacagatcattataaacctgcaatttcccatcgagatttaaacagcagaaatgtcctagtgaaaaatgatggaacctgtgttattagtgactttggactgtccatgaggctgactggaaatagactggtgcgcccaggggaggaagataatgcagccataagcgaggtgagtgtatacaaaaggtatcacactgatgtactttgaaatgataatttaattaaaacatctactggccaggtgtggtggctcacgcctgtaatcccagcactttggtaggcccaggtgggtggatcacctaaggtaaagagttcgagaccagcttggccaacatggcgaaaccccgtctctactaaaaatacaaaaattagccgggcacagtggcacgcacctgtaatcccagctactcgggagtctgaggcaagagaatcgcttgaacccaggaggaggaagttgcagtgagctgagattgtgccactgcactccatcctgggtgacagagtgagtgagactcaggacaattatcctcatatactgccaattatagaatactaggaattacaaaattaggaaatataaaagacatctcataaaggcctttgtaaagttcatcagtttattttggaactcactgccattccaagtcatttttacaagcattaggaacaaatttgtaggaactgatttttgaggcaagggtaaagttaccaagtttaagataacacagtccaccttctgataatcaccattacagtgtggaacgtatccttcccaactttgttctctgcattcatatatacttgtctgtgcacaacatatatgtatttttgtgattttaaaaatttatttatttgtttattttgagatggagtttcacttttgttgcccaggctggagtgcaatggtgcaatctcagcccaccgcaacctctgcctcccaggttgaagcaattctcctgcctcagcctcctgagtagctggcattataggcatgtaccaccatgtctggctaatttttgtaattttagtagatacgaggtttctccatgttagggtggtcttgaagtcctgaccttaggtgatccacccaccttggcctcccaaagtgctgcaattacaagtgtgagccaccacgcccagctgtatttttttttttttttttttttttttttgagacggagtctctctctgtcacccaggctggagtgcagtggcgcgatcatggctcactgcaagctccatctcccgggttcacgctattttcctgcctcggcctcctgagtagctgggactacaggcacccaccaccatgcctggttaattttttatttttttttagtagagacggggtttcactgtgttagccaggatggtctcgatctcctgaccttgagatccacccgccttggcctcccaaagtgctaggattacaggcatgagccactgcacccggccacccagctgtatttttgtgaattttaaaaaatattaagttgtatacatattgttttgcaattttctcactgtatcttacagattatttatattgatatacataggaaagtctagctcattctttttgattgattaatagtattcactaaaatggatttaccacagtttacttattcaggaagggcattttataggtaaaaaataagttatagaaaggtttaatgacatggttagggtcaaataacattgacatgactaagatttatatataacttctggtctaatgtctgttcttcagaatatgctacgttctctctctaaaaaatatcactctaatttatcaggttggcactatcagatatatggcaccagaagtgctagaaggagctgtgaacttgagggactgtgaatcagctttgaaacaagtagacatgtatgctcttggactaatctattgggagatatttatgagatgtacagacctcttcccaggtaaaaactactgtcaaaagttgatattttttgaagtgaagcagttatatcttctttctctacctatagtacctaactcaacttttatgtaagaatctttttactttcatttaaacctttagttcattgctatctagtgtttagaaacattattagcagcaggatgcaaattaggaatttttttttttagagtactccaggttttcatctgagtgaaatttaattaattgccagtaatagcttatctaactgtattttgtttggtctctgattgctttagcagtaaacattttccttatgcaccatctgagtgtttgagacaaggtacacttacgatgtttactgagttgaacccagaaggaattagaagcaatgaattatttgtaaacactttttccttttctttttttttcatgctccctttctccctccttccttctttccttctttcttccttccttcctcttctctcaccttatctccttcccttcctcctcttttctcttcttccttcctttcaatgaaagaatactcattggccaggtgcggtggctcatgcctataatcccagcactttgtgaggccgaggcttgcggatcacctgaggtcaggagttcgagaccaacctgaccaatatggtgaaaccccgtttctactaataatatgcacctgtaatcccagctgctcaggaggctgagataggagaattgcttgaacccgggaggcagaggttgcagtgagccaagatcttgccgttgcaccccagcctgggcaacaagagcaaaactctgtctcaaaaaaataaaaaaaggcctggcgcggtggcttacacctgtaatcccagcactttgggaggccaaggcaggcggatcatgaggtcagaagttcgagaccagcctggccaatatggtgaaaccccatgtctactaataatacaaaaattagccaggcgtggtggcgagcacctgtagtcccagctactcgggaggctggggcagaggaattgcttgaacccagtaggcggaggttgcagtgagctgagatcacgccatggctctccagcctgggtaacagagcaagactccgtctcaaaaaaagggaaagaatactcatttaagtgaatgtttgtttgaggcttacttgaaatagccaaatgaatttatagttttcccttcttagggattacatcgttgtagtatcatctaaaaactttaactataaatctggcattgcattcttctaggtgctatacagatgatttgatctgtgtggccactgtcttttaggagtaacaccattaaaagcatagaaaaaggaactagcattggacaaatttatgaaatagagctatttaatttaaaaagattaataatggagttgaattgtttggctttaaagacattaggcattacacattagtttatatatatcaagtgtgtgtatatatatatacacacacacacacatatatatgtatcgtgtgtgtgtgtatatatatatataaataaaatttttatttatttatttatttatttatttattttttattgataattcttgggtgtttctcacagagggggatttggctgggtcataggacaatagtggagggaaggtcagcagataaacaagtgaacaaaggtctctggttttcctaggcagaggaccctgcggccttccgcagtgtttgtgtccctgggtacttgagattagggagtggtgatgactcttaacgagcatgctgccttcaagcatctgtttaacaaagcacatcttgcaccgcccttaatccatttaaccctgagtgggacacagcacatgtttcagagagcacagggttgggggcaaggtcacagatcaacaggatcccaaggcagaagaagttttcttagtacagaacaaaatggaaagtctcccatgtctacttctttctacacagacacggcaaccatctgatttctcaatcttttccccacctttcccgcctttctattccacaaagccgccattgtcatcctggcccgttctcaatgagctgttgggcacacctcccagacggggtggtggccgggcagagaggctcctcacctcccggacggggcggctggccaggcggggggctgacccccccacctccctcccggacggggcggctggccgggcggggggctgacccccccacctccctcccggacggggcggctggccgggcggggggctgaccccccccacctcctggccgggcgggtggctgaccccctgccacctccctcccggacgggtcggctggccgggcgggtggctgacccccccacctccctcccggacaggtcggctggcctggctgggggctgacccccccacctccctcccggacggggcggctggccgggcggggggctgacccccccacctccctcccggatggggcggctggcctggcggggggctgaccccccccacctccctcccggacggggtggctgccgggcggagacactcctcacttcccagacggagcggctgctgggcggagaggctcctcacttctcagacggggcggctgccgggcggaggggctcctcacttctcagacggggcggttgccaggcagagggtctcctcacttctcagacggggcggccgggcagagacgctcctcacctcccagacggggtctcggctgggcagaggcgctcctcacatcccagacggggcggcggggcagaggcgctccccacatctcagacgatgggcggccgggcagagacgctcctcacttcctagatgtgatggcggccaggaagaggtgctcctcacttcctagatgggatggcggccgggcggagacgctccccactttccagactgggcagccgggcagaggggctcctcacatcccagatgatgggcggccaggcagagacgctcctcacttcccagacggggtggcggccgggcagaggctgcaatctcagcactttgggaggccaaggcaggcggctgggaggtggaggttgtagcgagccgagatcacgccactgcactccagcctgggcaccattgagcactgagtgaacgagactccgtctgcaatcccggcacctcgggaggccgaggctggcggatcactcgcggttaggggctggagaccggcctggccaacacagcgaaaccccgtctccaccaaaaccagtcaggcgtggcggcgcgtgcctgcaatcgcaggcactcggcaggctgaggcaggagaatcaggcagggaggttgcagtgagctgagatggcagcagtacagtccagcttcggctcggcatgagagggagaccgtggaaagagagggagagggagaccgtggggagagggagagggagagggagctaaataaaatttttttaagagacagagcctcactctgtcacctaggctggagtgcagtggtgtgatcacagctcactgcagccttgacctccccaggctcaggtgattctcccacctcagcctctgagtagctgggactacaggcatgcaccaccaagcctggttcatttttgtatttttttgtagagacaaggtttcaccatgttgctcaggctggtctcaaactcctgggctcaagtgatccacccacttcagcctccaaaagtgcctggattacaggagtgagccaccgcaccaggccaaacattagtttgtaattcaaaaatataatgaaataaatcagtgattagtagattaagtacaggttaatcagttatctagaagtatattttctagttaattaaaagtacagagattcaattgaggcatttttctgaaaatagcagtaattgcagtagtatcaacaagtactttttttggccgggtgcggtggctcacgcctgtaatcccagcaccttaggaggccgaggcaagtgtatcacctgaggtcgggagttcaagaccagcctgaccaacatggtgaaaccctgtctctactaaaaatacaaaattagctggatgtggtggcacatgcctgtaatcccagctacttgggaggctgaggcaggagaatcgcttgaacccgggaggcagaggttgcaaggctgagattgcaccattgcactccagcctgggcaacaagagtgaaactcggtctcaaaaaaaaaaaaaaaaaaaagaagtactttttttgttttgtttttaagagacagggtctcactcctgcccaggccggagtgcagtagtgcaatcatagctcactgcagcactgaactcttgggctcaagcagtcctcctgctcagcctcctgagtagctaggactacaggtgcatgccaccacgcccggctagtattttattttttgtcgagacagtgttttgctgtattgcccaggctggcctcgaactcctgggctcaagtgatcctcctgcctcagcctcccaaaatgctgtgattgcaggcatgagccaccacacccaaacccacaagtattgtattatcagaactttgaccacagtttggtaatttctttgttaatagtctcatgtaggatttttgttttagaagcatgtctgactgaaatgattttttcatcagattagtacactgctacaaacaatatattttgaaaaactactgtgttcaaagaatgactatcgcttttgatctgataaataataaagaatgatattaaatgtttgaatagggaaaggcaattaaatcttgttttcagaagattattttagcaaatatgtaggattaattaaaatagaaatagaactagaaggggcttaaaaaggaaaaagaaatggagagttactgtttaatgggtacagagtttcagtttgggaagatagaaacagttctagaaatggttagtagtaatggttgtacaatagtgtgaatgtacttaataccacagaatggtgcacttaaaaatggttaaaatgatcagttttatgttatgtatattctaccacgataaaaaaaaaataaaggaataagaagagagttgctttaaaataccccgtaatcttggatatggaaatggggagaggcaaatctgggagaaaatgcagagaagaaatctgtacttgtggttatctgttaaaagaatgagatgtcaggccaggtgtggctcacgcctgcaaacccagcactttaggaggctgagaggggtgggggtggatctccaggtcaggagttcgagaccagcctggccagcatggtgaaaccccgctctactacaaatacaaaaattagacaggtgcagtggcacacgcctgtaatcccagctactcaggaggctgaggcaggagaatcacctgaacctgggaggcagaggttgcagtgagccgagatcgcgccactgcactccagcctgggtgacagaacgagactccatgtcaaaaactaaaaagaatgggattcaaaggaattgagaaatattcagaggttggccgggcacggtggctcaggcctgtaatcctagcactttgggaggctgaggtgggtggatcatttgaggtcaggagttcgaaaccagccgggccaacatggtgaaagcctatctctactaaaaatatttaaaaatcagctggtcgtggtggcagtcacctgtaattctagctacttgggagtctgaggcaggagaactgcttgaactagggaggcggaggttgcagtgagccgagattgcctccattgccctccatcctgggcaacagagcgagactccatctcttaaagaaaaaaaagaaggaactattcagaggtcttaaaacacagtgagggtgggccaggcacagtggctcacacctgtaatcccagcactttgggaggccaaggctagtggatcacctgaggtcaggagtttgagaccagcctgaccaacgtggtgaaaccccaactgtactaaaagtacaaaaaaattagccgggcttggttgtgggcacctgtaatcccagctactcgggaggctgaggcaagagaattgcttgaacccgggacgcagaggttgcagtgagcagagatcgcgccaccgcactccagcctgggtgacaaagcgagactctgtctcaaaaaaaaaaaaaaaaaaaaaagtgagggtcagagtggcaaccagaaagatgagttaatcctggagactgttcgatggggtattgacagacaactaaataaatttttaaagacaattaaaaataataaataagatggaaatttaagattaaaatggttatttgggagttgtctacatagagatggtaactgagaagttatgagtcgatgcactcctttaactggaacataaaaagaaagaaaaataggtgaataatgactgaatattggggtactacccccatgaagtaggttaattaagaagacaaatgatcagaaaagtagtgagaaaactgaaaaatcctaatgccttgtaagtcagtattagaaaactttaagaactaagatttcagcctgaggaagctgattaaaaaataaaaataaaaaaccacaccaagattgatggcaatagatgtaattgaaaagaggaaacagaactgaggaatgatttttgaatttgagtaggaggaggtcattggtatttttagaagagtttctgtggaatacagaacacagaaatcatgttacagagtgtatataggaggggaaagtatttaaaaagcacagtcaagggatacagggcactcttgaaaattttaacaattaaatgaggtggaagtagaaaagaaaaaaggatcatataaatatattaataaacctagagaatagtgtatactaactataaaattcttataaaacattttttaaacttttatgatatacctcaaaatgcagtatgtgctgtattattaaatggaaacactatgtaatgaaggttacttctctataaaatgttagtaaaataaatgatttatctgtattacagaggaagagtgaaatgctacaaagtttaaatagaagggggagaaggaagaaaaaaagaagagatagaaaaaggaagaaagaataagtgtaatttgagaagggagctaaaaaaaggtctgtaactggtagagacatagttaacaagtggcacatggggtgagaagcaggtaatggtatctgatagtgctagatattactataagatattttgggcagttctaaagaaaatgagattataaaactttccttgagcaatccagcgatagtaaggaaattcagtaaggttttaaggaaatccaataaggttattatcttccatgatgatgatttttgtcattaacattcacctttgtatctctaatacctaacactaagttagcactaaacaagtttctattgaacaattagattttgaactgtgaagatttagtggaaatttatttggtaattcttaaccattgcattcataaaagattgtgcttcaatttcctttagcaacttttaaaattataatttggacctaattttttaaaagagtgaaattgtgaatttttagttattctactaaaccagcatttgaaaaaaaaataataaataacacttggaaggtatgtgtatgtgttgtgtgtatgtctcagagacagatcagatacattagtaaataccttgcaattcacagatggtataggataaggttttatcacatggggtttcaaggaagaaagtgatatactaactgccatgattattaaatcctttaattttatctctcaagttcaatgttgatgttattgatcaacactaagtatctgcttaaatgtttacagtatgtgaaactcacttgtatttatacataaggcagtattacaacaaacttgggcgatgctgcacagataatagaattaatctttgtaaatcttttttaatattggtggagggcaagtatttattagttgttttgagtattcaaatagaaacaaaacttaaatgaaacataaacttatttgtaatgtggtttccatctgggtcattataactttgtattatctccatgtaagtgatataaggaaggctgcagacattgccattttgcttacaggaagtctgaaacacagaatagttaaatgacttttccaaggtcaagatgaagtgaagattagaacctaaatgccttatcctctgtcttggcgttcttccttctaatttatcttgtcattttaatagggtgggaggacgggtaaagagacaggaacagtctctgtgttctttgccatggtttctactagatcattgagtgttggtcccaggggtcttctatgtggttcaatatattatatacataaacttaattttattatcatattttgtaaaaatcaaaagcctaacatcagagttgattgtgcttattggcaatgaatagggttattaaatagtgataaaatagttaataatatttaagtccatgatctaaatactacctgttagttaaaaggaatttttagagctgggcacagtggttcacacctgtaatctcagcaccttgggaggctgaggcaggaaaatcatttgagggcagaagtatgagaccagcctgggcaacacggcaagaccttatctctacaaaaatatttttaaaaattagctgggcatggtgccacactcttgtagtcttagctattagggaggccacttgagtgcaggagttcaagttacagtgagctatgataatgccaccgtactccatcctgggcaacaaagtgagagcgtttctttgaaaaaaaatttttttaaagtatattgatttttctttcaaatgaccattatcataaatatttttgtaacatttgatacagtctggctggactataatagaaccaatgatgtaatgagacatagtgactgttcaacccacccacttacatttggttctgtaggcatatttgttgtactaggtcctggagtttttcctcatctttacccgcctccatgggatcagtgttcaggcatgttttcaagtattaagtatgccttataaacataatagtcttttttccctgaatttagtaataccagaaaccatttaaaaatacctatccatcattgaaactaccatttgacttatcaacaaatatttgagactattctaagcaaaacattcattaataatgcattagactgggcatggtggctcacgcctgtaatcccagcactttaggaggccgaggctggtggatcacctgaggtcaggagttcaagaccagcctggccaacatggtgaaaccctatctctactaaaatatgaaaattagctggacgtggtggtgtgcgcctgtaatccaagctactcgggaggctgaggcgagagaatcacttgaacccgggaggcagaggttgcagtgagccgagatcatgccactgcactccagcctgggcaacagagtaagactccgtctaaaaaaaaaaaaagaaaaaaaaatcattaaacctacagcaaggtctctttaggatttccaaatgtgcctgaaggggatgaaaaaataaaaagattgtgacacaattttttttgcttacttggtatcagaaatacccctgttattctatcatttatgatagttagaaattttattctgtcattcttttctacaaatccacaggggaatccgtaccagagtaccagatggcttttcagacagaggttggaaaccatcccacttttgaggatatgcaggttctcgtgtctagggaaaaacagagacccaagttcccagaagcctggaaagaaaatagcctggtaagaaaaaactaagttattaaagagaggacttatgactgaatatgttttaatgttgtttgaaacaaaaatagactgttaataacgttaatagtttttggagttgcctaatgccacaaatcaaacttgatttttatgatgttttcaaatttttcaatatgaaaaaaagtcagttttagttccattttgtttttttccaagcttaaaatactatttagagagaataactaatgtgtcataagtttgccagattaggtaacagctggataaattaacatattaatattttaaatattattgaaattctatcttactctcttgagaatagtaccaaaactgttaagtagtgcaggcttacataaccaatggctaatgaaaatttaggctagacctgaaaaaaaccaaggcgcagcctatgaattctgctaattattaaaaatataattcggctgggtgcggtggctcacacctgtaatcccagcactttgggaggccgaggcgggcagattgcctgagctcaggagttcgcgaccagcctgggcaacatggtgaaaccccacctctactaaaatacaaaaaattagccgggcgtggtggcgtgtgtctgtagtcccagctagttgggaggctgaggcaggagaattgcttgaacctgggaggcagagattgcaatgagccgagatcacaccactgcactccagcctgggtgacagagcgagactctgtctcaaaaaaaaaaaaagcatatatatatatatttatatacatatatatttatatatatatttatatacatatatatttatatacatatatttatatatatgtaaaattcacaacaatgaaatatctcaagtcccctgccatttgagtaagttgttgttacaacactgaaaacatcttacaaattaacaaatatacactcatataatcttttagtataaataggataatctaattatctactatcatttctgaagtttatttttttacttaaacacatttttttaatgtcagtacctctagatgtatctatttctctccatttggtcagtattctattgataaaatcatataatgattctattggatgatatatgataattattgtattaaaaaggaaaaaactacctctccctactatcactctccgtaagtaactccctttagcaatcttttgggttttttctcttccaaagattaccattataacttcaaatactctatctattcttaagttatctctcgtttactttctcccagtttgtaatattctattattaaatgatttatgttttgtctgtaaattcatctaatatttaaatacaataacgagaaatttttggtattatgattatgtaagcattcactgcacaacaaagtattgtgcttggatttataggaaataaaaattctacattagttactaaaatctcccctgcgctttggggagaatgtttcaagttatcatccatcacttgagcccaagggtttgaggctgcagtgagctatgatcacaccactgccctccagcctgagtaagaccctgtctctttaaaaaaaaatgtcatcaagtctcagctgcccaggaggctgaggtaggagaattgcttgaaccccagaggtggaggttgcagcgaggcgagatcgtgccactgcactccagcctgggtgacagagtgagaccccatctcaaaaaaaaacaaaaaaaaatttgaaaagtcatcatcaaatgatttctttttggtttcttgtcatctttctttgtcttgtttttaggctatactcagaagcgcattaaaaatctcatgtcattctctttcttgtaaacgattgtttttttgatgaagttcctccttaagtaatgtgtattagtatgtgtatggtggtaaacattatgaatccttgcatgtttaaaaatgtttttatcttgccctcacactcgagtaataatctggctggataatagtttcaatatcataattattttcttcacaactttgaaactactactccatcattctctagcctacaatctccatgtgctctaggccctagtctccagtctaatgagaatttcagtgccatcctgaatcgtttcattgctttttgtttcgttatgtttttgttttatcctcttaattttttttctctataagcttttaagactttatcactagaattgtgaaatttcaccttgatgtttgtaggcatggatctttacacacattttgcttggcactgggtaggttttcagtttgaaaattcaaaagtttcttaaattcagaggaattttcttttttctttttctttctttttttttttttttttttttgagacaggatcttgctctgtcattctggctggagtatagtggtgtgatcatggctcactgcagctttgaactcctctgcttaagctattctccttcttcatcttcctgagtagctgagacttcaggtgcataccactttgcctggctttttaaatttttggtagagacagggtctcgctttgtttcccaggctggtctcaaactcctgaattcaagcagtcctcctacctcagcttctcaaagtactgagatcataagcatgagccatcatgcctggcctggtatttttttttaattatttcttacctttcaattcttccttctggaattcccactagacaaatattgtaccacctgacattctaagaatcatttttttcttatattttccattttttctccctctatgtttttcttcctcccgtccccctcccctccccacacacctggcctcccttactacatttttcaagatttactcagctttatcttcaaatgacccatttagttttcactattacccttgtatcagttatctattcattaaagttttagcttccacgatcataattatatttccagaaactcgtttgccttttccatagcaatctgttcttatttccagaatgtaataagagtgattcattctgaaggtgttgtttttatgctttacacaaattaattttcttgactataataaaaggacaaaaagtgaaaaaataagcaacttaaattattttactatgtattttcacatttcaattttagattgtcttggtaggactaaaataatatttccattttggatcctgatttaagtggggtgatgtcatgtcagagacagggtagagacacattatagtttccatacagatttagaatgagcactgtcttcattggttatcttagtcactaggttactttcaagtttggcttctgtttcaagtcagattgaaatatttaagtatgtggcaattaaggagcctattgtcaagcacatacgtccaagattgcttccaaaactacagtccctgctatgggaactgggacagatttttgagaggtccctgatagcaagtgagaggctgaatactttactaggattaattagaggtgccagcctcacaatagagtatccctaaaagaaaaatctgtgaaattttattctagtaaaatacaacttcatcttccttaaattgttttatttcaccagcgcaaatgggatctattattttgaaatatctctcggcaaccctattattatgagatatgcatcatatgcatatttacctgaaaactttttacttccagtatagagtaggttgccaagtaaggaattcataatacttggttcacttccagggaatccatttaaatctaatgtgctacagtcaataaactgcttctctgcagtgacaatccaatactagagttaggtagcaagtacatagtttataaaaagagagaaatgcagctatgtctaaagaagccatttttgctttcatagttgcattgagattaagaaacattcctttagtagtaaaactcagaatctttcaaatattaatgaatataaaaactagctttaattttataaattgccagggactcaagcatagtttagtcaataaaggggggaagaatagtttcctgataaaaatgaaagcatagaaaatagtctaaaggaaatacatgaaaatgttaaaccatagttatctctgaatattgagttcataaatgactttttcttcctatatgtttcagaatttacagtaaaaatgaactactttaacaatcacatacacatggttttgtttttgtttttgtttttgtttttttgagacagagtctcgctctgtcactcaggctggagtgcagtggcgcaatctcagctcactgtggcgtctgcctcctgggttcaagcgatttttctggctctgcctcccgagtagctgggactacagtcacgtgccaccatgcctgactagtttttgtgtttttcgtagagatggggtttcaccatattggtcaggctggtcttgaactcctgacctcatgatccacctgcctcagactcccggagtgctgggattacagacatgagccaccgtgcccagccggtgttttgttttgttttgttttgttttgttttgttttgttttgttttgtttttgtagagacagggtagttgccaagactagtcttaaactcctggcctcaagcaatcctcccacctcggcctcccagagtgccgggattacagtcatgagtcagcatgcctggcccccacacacagtttaaggcttttgttttatgttaaaatattttaaattggtaaaataaaaaattataggccacgtttattttaaagtagcttttttcctcctacataaaattttcaggtataatttgtttaactgtactaccattcttcatgttttccattcttttccagttttttgtcacccatactatagtgcagggggacaataatagctcactgtagcctcgaactcctaaagtgctgggattataggtatgagcccagcctcttttccaaatgtttatactccatttcttagtctgtcttgaattcttttctctcccctgttaaaatcacttgcctggcttttctttattccttagtgttagttttgtataacctcttgtaatcaatggttttatcctaatatattttcacataaaaggtggcaacttagccaggcacggtggctcacgcctgtaatcccagcactttgggaggctggggcatgtggattacttgacgtcaggagttcgagaccagcctggccaacatggtgaaaccccatctctactaaaaatacaaaaatgagctgggtgtggttgtgcatgcctgtaatcccagcaacttgggaggctgaggcaggagaatcgcttgagcccgggaggcagaggttgcagtgaacagagatcatgccactgcaatccagcctggacgacagagcaagatccatcacaaaaaaaaaaaaaaaaaaaaggccaggcacggcagctcatgcctataatcccagcactttgggaggccgaggtgggtggattgcttgagatcaggagttttagaccagcctggccaacatggtgaaaccctgtctctactaaaaatacaaaaaattagccggacatggtggcaggtgcctgtaatctcagctactcaggaggctgaggcaggagaatcacttgaacctgggaggtggagattgcagtgagccgagattgcaccactgcactccagcctgagcaacagagtaagattccatcttaaaaaaaaaaaatgcggcaactcttcctcagtttatgtttgccctctggtctttttaagaaatatatagtacatttcagaagaaactaccagttcttttcacatagttttagtttttccattttctcttttggacaaaatctatagacttctgtgatctagaattcaacattttacatactttttcatctgacacaacccacattaagaaatacaacttcagccaggtgcaatagtgcacacttgtagtctaagctacataggaggctgagggaggagtatcgcttgagcctaggaatgtgaagctgtagtacacaatgatcccacctgtgaataaccactgcagtccagcctgggcaacatagtgagaccccatctcaaaaaaaaaagcaaagtttacatcattacatatagtataatacttaaccttaccacctactctatgtcctagtgttttctattctagtctagagcatttcagttttggttagagttgtttgttttaaaccactgagctgattttatgacccacccatgagatccaacttacgttttccttcctttgggtaggaaagattgaaaaagttccttgtttatcttttctacttttttttccccctacttgtctttcctcattagtgttaataatgccactccctttaacttatttacacaagcattaaggtatcattatttacctattcctagagttagagtcccctttcaaaggacgcatcagattttgcctgaatatttatgttttcacttctgatttattctcaatttttgtacatttaaagagctataattgataaactgcacgtattaaagtgtacatttaggtgtgttttgatatatgtatacacccataaaaccatcatcacagtcatgattgtgaacatgtcaattacccccagaagatttcttgtgcccttttgtaatctctcctcaactttctctatcccccatgagtccccaggcaaccactgatctgctttctgtcactagagattagtttacattttctagaattttatataaatggaatcatataaatgtactgtttttctggcttctttcagtatgattattttcagttataattaactattagttataattattcatgttcattattagttataatattattattagttataattattattcatgttcttatgtgtagccatagtttattaattgctaagtagtatttcattgtatgcatatgatacagtttgtttgtccatccactcgtgatggatatttgacttatttccagtttcaacttttataaataaagctgctgtgaatattcatgtacaagtctttgtataaacatatggtttcatttacttaggtaaatatctaagagtagagtggttgaatcatgtggtaggtatatgtttaactttttaagaaactgccagtttttgtgaccgggcgcagtggcggagttcaagaccagcctggccaacatggtgaaaccccatctctactaaaaatacaaaaattagccgggtgtggtggtgcatacctgtaatcccagttactcgggattgaggcttgagaatcgtttgaatccaggaggcagaggctgccgtgagctgagatcgcaccactgcaatccagcctgggcgacagagcaagactctgtctcaaaaaaaaaaaaaagaaaagaaaagaaaaaagaaactgccagttttctaaagtggttgtgccattttacattctggccagcagtgcataagagttccagtttctctgcatctttgccaacatttggtattgccagtctttttaattttaaacattcttttttgggggtggtggagggagtacagagtctcattgtatcacccaggctggagtacagtgctgccatcatagctcgctacagccttgacctcccaggctaaagtgatcctcccacctcagcctcctgagtaactgggaccacaggtgtgcacaaccacatccagctaatttttaaaaatttttggccaggtacagtggctcacgcctgtaatcccagcactttggaaggttgaggtgggcggatcacgaggtcaggagatcaagaccatcctggccaacatggtgaaaccccatctctactaaaaatacaaaaacaaaattagccaggtgtggtggcgggtgcctgtagtcccagctactcgcgaggctgaggcgggagaatggcacgaacccaagaggtggagcttgcagtgagccgagatcgcgccattgcactgcagcctgggcgacagagcgagactcctatctccaaaaaaaaaaaaaaaaaaaaaattgtagaaatggaatcttgctatgttgcccaggcttgtcttgaactcatggcctcaaacagtcctcccactgcagccttccaaagtcctgggattacaggcatgagccaccatgcctagcctagatttataattatcattttatgcttttctctcttaaataagaaaaaaggaggaggctggatgtgatgggtcttgcctgtaatcccagcactttgggagaccgaggcagaaggaacattttggcacagtggtgccttagtcaggcacagtggtacttgcctgtcgtcccagctactcaggaggctcatgtaggaggattgcttaggtccaggagttcaaggctgcagtaacctgtgatcatgccacagcactcgagcctgggcaacagaatgagacctctttttttgtttttgtttttaaaaaggagttacaaaccaaaaatataataatagtggcttttatagttacctaagtaggcttttgggttctacttattatctaatgtcctttgagggactccctttaacatttcttgtagagcatatcagctttttttttttttttttttttttttttgagccagagccttgctctgtcgcccaggctggagtgcaatggcgcgatctcggctcactccaacatccgcctcctgggttcaagcaattttcctgcctcagcatcccaaatagcagatgtagatatatacaagtctttgtataaacatatggtttcatttacttaggtaaatacctaagagtaggatgattgaatcatgtggatgtttaaaaacaaacctagtctgtttttaaaaagggagttaaaaccagctttcccctggccaggcgcagtgactcatgcctgtaatcccagcactttgggaggccaaggcaggtggatcacgaggtcaggagttcaagaccagcctggctaacatagtgaaaccccgtctctactaaagatacaaaaaaaaaaaaaaacagccgggcgtggtggcaggcgcctataatctcagctactcaggaggctgagggaggagaatcacttgaacccgggaggcggaagttgcagtgagcagagatcgtgccactgtactccagcctgggcaacattgcaagactctatctcaaaacaaacaaacaaacaaaaaactagctttcccccaaagggagactattatagggagactattgttcattgctaatagataggaatactgcagaatgggactgtttttgatactactgttttggaactagtttaaagaagagatgtctgtaagttttaaggttgaaatgaggcactcttttttttattcttttgaggcggagtctcactctgtcacccggggaggagtgcagtggcacgatcttggctcagtgcaacctctgcctcccgggttgaagcaattctgcctcagcctcccaagtagctgggactacagatgcataccaccatgctggctaatttttttttttttttttttgagacagagtctcactctgtcgcccagtctggagtgcagtggcatgatctcggcccactgccttcatggttcaagcgattcttctgcctcagcctcctaagtagctgggactacaggcgcatgccaccacacccagctgatttttgtatttttagtagagacgaggtttcactgtattggccaggctggtctcgaactcctgacctcgtgatccacccgacttggcctcccaaagtgctgggattacaggtgtgaaccaccacgcctggccaatttttttatatttttagtagagatggggtttcaccatattggccaaactggtctcaaactcctaacctcaggtgatcttcctgcctcagcctcccaaagtgctgggattataggcgtgagccactgcgcccaaccaagtatccttaactgggggtaaaggagaaaagctcacctagagatagaagacagccaaatgtccccaagttccatcaaactcaaaacttatttttgaagcagaattagtggctattgattgacataacgtaactgaattagcaacaatgacctaaacctgtggccttgaagaaacatctacgacttattgttgcttttacttttatgaataattcttcaaggagttaaggtaaatcttgcttgcttacttgttcatcaccttttgagcatgttccgtaatccttgaagcctaaaatatgttattagagctatgtaaaatactggttaaggtaattgatttttcttttacctcatgtggtaaactgaaaagctcaatacatttttttttttaaagacacatggtttgacatgtactttgtcttacaggcagtgaggtcactcaaggagacaatcgaagactgttgggaccaggatgcagaggctcggcttactgcacagtgtgctgaggaaaggatggctgaacttatgatgatttgggaaagaaacaaatctgtgagcccaacagtcaatccaatgtctactgctatgcagaatgaacggtaagaccctaaggggtgtggcatctatcaatcagtattagaaactgagacccaacaaagaatagaaaataaatacttttaaaccagcctaatagttcaatgattacctcatacaatctaaagttatcatttttctttcaatattcctattcttctattgaacatttttgtttggtacaagtgcaagatgaaatctgcattttttaatatgtaaaggtatagtgaaagaagttagtctttctctatttatggtccaactttcctgcaataataaaggtaaaatgtttttataactccaaaagttcataagcacttctatataaattgtctcatttatcctttgttgttattccttcttcctctgcttttttttttaagtaaatggaactatgaacttgcctatctaaccactgtttcactgacactaaggtttgtagacttcctatctaatgctctttcttatagaatatactactactacttttatatgaaagcaattcaaaggtctttctgttccatcattaatattattttacaagacattttctttgttagaactatgatttttggttctaaatagaaaggctttttaaaaattcctacaatttggaactttctacatctgtatttcttttttccatgtttggggtaaaaaagcctttctatgactttgtcattttgtctaatacatgtttaaaactttcagaaaggcatccaggaaagggttactggagaaaattgaaataaaaataaactcgattcttgaaactttttttttttctgtgtggtttttgtttttttttgtttgtttgtttttggaaactgtgtcttactctgtcccccaggctggagtgcagtggcgtgatcctggctcactgcaacctctgcctcccaggtttaagcgattctcctgcctcggcctcccgagtagctgagattacagtcacgagccaccacgcccagctaattttgtatatttattagagacagggtttcaccatgttagccagactggtctcaaactcccgacccctggtgatctgcctgccttggcctcccaaaatgctgggattataggcgacaggtgtgagccaccgtgcccggcctattttctgttctaatttgtgaaagctatttgtattagccataggtgaaaaatttggtttgcactacttttgtataggtcaaattagtttcaaatataaactcttataccttgtatatcagcaaatcaagaaagttagacactggcaattctaattataaattttctcactttacacatacctgaggacagtcttctgcttttatctcccctcatctctgtatttcccatgtcctctagtatgatgtttttacctctctcaaaagtcagctaaagcttttattttgaatgctttcaaacttttcttgaatggtaagaaaaaaaaaccttgatggcccaccttgatttggccacttttcgcctcctgtgtcattcggctcaaccttctgcatgcatcttctcatctccagtctctactaataatttcctcaaaattataattcatcccatagttacgctaactctaggttttattttcctgagtcttaccctccatgtctccttagcttccttttcttgtactgtataacaatttttttttcttcttttccttctatcatctcccttataaataactgtcactcccaaggaatgacaatgacagcaaagaacccatgataattggagagcagttctgaatctttgatcctttatttgaacatcatattctgccttataccttaggctcaaggacttttactgatatgactcagactaccccagaaagatatgtgccattactagggcatgcctcttaatggaggcctttggaacaacctaaaagcttatattctttttactatttggccattggaacttaattgataacataccttttgagtaggcactatgcatctagaattatggaaatacagaaaacatataccatggttcttcctctcataaaacataacgtctggttgtatgaatatacattccataaatatatatttcatgatgttataaaactataggggagattttttaattaacttataaaccaaaataatgaacatttataaaaattatatctcatccacatacatttttcagtaggcttaattcacataaaactaacacttatcaagttattaattgacacttgattatttgattagactttttaacctttagaaaaatgtacgtttggaagaaaatgaaaaacaactcagactttaaaatcagaggtgttaaatttggagagacagtttgtcataaatgtacgttctcaatgtgatactttttttctttctttaagcaacctgtcacataataggcgtgtgccaaaaattggtccttatccagattattcttcctcctcatacattgaagactctatccatcatactgacagcatcgtgaagaatatttcctctgagcattctatgtccagcacacctttgactataggggaaaaaaaccgaaattcaattaactatgaacgacagcaagcacaagctcgaatccccagccctgaaacaagtgtcaccagcctctccaccaacacaacaaccacaaacaccacaggactcacgccaagtactggcatgactactatatctgagatgccatacccagatgaaacaaatctgcataccacaaatgttgcacagtcaattgggccaacccctgtctgcttacagctgacagaagaagacttggaaaccaacaagctagacccaaaagaagttgataagaacctcaaggaaagctctgatgagaatctcatggagcactctcttaaacagttcagtggcccagacccactgagcagtactagttctagcttgctttacccactcataaaacttgcagtagaagcaactggacagcaggacttcacacagactgcaaatggccaagcatgtttgattcctgatgttctgcctactcagatctatcctctccccaagcagcagaaccttcccaagagacctactagtttgcctttgaacaccaaaaattcaacaaaagagccccggctaaaatttggcagcaagcacaaatcaaacttgaaacaagtcgaaactggagttgccaagatgaatacaatcaatgcagcagaacctcatgtggtgacagtcaccatgaatggtgtggcaggtagaaaccacagtgttaactcccatgctgccacaacccaatatgccaatgggacagtactatctggccaaacaaccaacatagtgacacatagggcccaagaaatgttgcagaatcagtttattggtgaggacacccggctgaatattaattccagtcctgatgagcatgagcctttactgagacgagagcaacaagctggccatgatgaaggtgttctggatcgtcttgtggacaggagggaacggccactagaaggtggccgaactaattccaataacaacaacagcaatccatgttcagaacaagatgttcttgcacagggtgttccaagcacagcagcagatcctgggccatcaaagcccagaagagcacagaggcctaattctctggatctttcagccacaaatgtcctggatggcagcagtatacagagtaagtggagggatcatataatctctcctgtgtgtcttttggggccatttaaataactatttagaatcaactaatagatatatttcaactagtgattatttacctttaccacttttgtaaatgatccatttgaggcggggcacagtggctcacacctgtaatcctagcactttgggaggccaagggaggtggatcacctgaggtcaggagttcaagaccaacctggccaacatggcgaaaccccatctctactaaaaaataaaaaaaattaggccaggcgcggtggctcacgcctgtaatcccagcactttgggaggccaaggcgggcagattacttgagatcaggagttcaagaccagcctggccaacatggtgaaaccccatctctaaaaaatacaaaaattagccaggcgtggtggcgtgcacctgtaatcccagccgagatcacgacacttcactctagcctgggcaaaaaagtgaaactccatctcaataatgaaataaaataaaccatttgggccaggcgtggtggctcatgcctataattccagcactttgtgaggccagggcaggtggatcacctgaggtcaggagttcgagaccagcctgaccaacatggtgaaaccccgtctctactaaaaatgcaaaaatggccaggcacagtggctcatgcctataacccagcactttgggaggctgaggcaggtggatcacgaggtcaagagttcaagatcagcctggccaaggtggtgaaacccctgtgtctactaaaaatacaaaaaattagccgcgtgtggtggtgggcacctgtaatcccagctactcggaaggctgaggcagagaattgcttgaacccaggaggcggaggttgcaatgagccgagactatgccactgcactccagcctgggtgacagaatgaaactctgtctcaaacacacacacacacacacacacacacacacacacacacacacacacacacaaattagctgggtgtggtggtgcccacctgtaatcccagctacttgggaagctgaggcaggagaatcgccttaacccaggaggcggaggttgcagtgagctgagattgcgccattgtactccagcctgggcagcaagagcgaaactccatctcaggaaaaaaaataaataagccatttggttgggcctcaaaggtaattagactattgtaaagaaaaaagtaatatttttgtcattgataattaaaaagtcagtgtcacaatagtcagaataattacccaatttaatatgtgctttatgtggctgctgctttataatgcaactcacatacttgctatgaaaagttgaaataaagtaaatacagttcaagagctccaagtaatgttataccagtataatctttgaaacattttattgcatatattaatattgattatgtctgcatttaggttttatcaaactaaccttaataaatcttaaagatccagagaaattttgggaaaattactataaagaaactgtaggctaggcacggtggctcacgcctgtaatcccagtgctgtggaagactgaggtgggtgggtcacttgaggccaggagttcaagactagcctgggcaacatagcaaaactccatctctacaaaaaatttaaaacttagtttggtgtggtggtctgcaacctctgcctcccgggttcaagtgattctcctgcctcagcctcccgagtagctgggattacagacatgtgccaccatgccctgctaattattgtattttagtaaaggaggggtttcgccatgttggccaggctggtctcgaacactggacttcaggtgatccacccacctcagtgtcccacagtgctggcattacaggcgtgaaccactgcgcccagcctatttctcttttagactaaggcatttatgaaaaaaagttatgttttattgtcaagggctacaaaatgggcttgaaggaaggatacaggtctcaaaacacaatcaggaaaatttagccccttgcttgagtggcttgtattacagatcagttgacagacctttattgcagggctctgagtcagtaagacatcgtgtcagataggccaggcatggtggcttacgcctgtaatcccagcactttgggaggctgaggcgggcggatcacctgaggtcgggagttcgagaccaacctgaccaacatggagaaacccggtctctactaaaaatacaaaagtagccagacgtggtggcacatgcctgtaatcccagatacttgggaggctgaggcaggtgacttgcttgaacctgggaggcagaggttgcggtgagccgagatcatgtcattgcactccagcctggcaacaagaatgaaactccatctcaaaaaaaaaaaaaaaaaaatcttgtcagatataggaagaggaaattattagaatgtttgtactctaatatttctgttattcttctgaaaaatattgtatgccaggtgcctttaaaatttgatccaggctgggcatggtggctcacacctgtaatcccagcacttagggaggctgagtcgggcacattgcctgagctcaggagtttgagaccaccctcggcaagatggtgaaaccccccgtctctactaaaatacaaaaaattagctggtcatggtggcatgcgcctgtagtcccggctacttgagaggctgaggcgtgagaatcacttgagcccgggaaacagaggttgcagtgagtcaagatcatgccactgcactccagcctgggctacagagtgagactccatcccccaaaaaaaaaaaaaaaatttgatccaccttgagcattaaatacaattaaatacaataattaagtacattttaccaagttaagatcgctaccaaaaccagaagatttgagaatacagctgagaagtttaaatgttctcctgtgttttgtgtgtgtgtgttttcccttgccttataaaataagtcaatcagttattaaaacatttgggttaaagagtctcaaaaataagttggttaagcttttcctggaaaaacattgtctggcattatgaatttcaagaaatgttcattagcaccctcctgagacattggtttgaccttttcttgagttacatcccttacccgttatttcttaagtttgttaaatagctcatttttctgcacttttattttcagtaggtgagtcaacacaagatggcaaatcaggatcaggtgaaaagatcaagaaacgtgtgaaaactccctattctcttaagcggtggcgcccctccacctgggtcatctccactgaatcgctggactgtgaagtcaacaataatggcagtaacagggcagttcattccaaatccagcactgctgtttaccttgcagaaggaggcactgctacaaccatggtgtctaaagatataggaatgaactgtctgtgaaatgttttcaagcctatggagtgaaattattttttgcatcatttaaacatgcagaagatgtttaaaaataaaaaaaaaactgctttatcctcctgtcagcaccccctcccacccctgcaacaaagacttgctttaaatagatttcagctatgcagaaaaatttagcttatgcttccatatttttaaattttgttttttaagttttgcacttttgtttagtctcgctaaagttatatttgtctgttatgaccacagagttatatgtgtgtgtatcaaaagtggtctcaaaatatttttttaagaaaaaaagcaaaaacaatgtattgctgataatcagtttggaccagtttcttaaggtcattaaaacagaagcaaattaagacaggtttgactgcagtggtgtctggtatccatgttttatttctgggcacaagctagtttttatgttgatacgttcctgaacatattatcttgttggacatcttttctcttgtgttttgtttgaatgtgcaatagtttataggccacaaataagctttcttgtaagctctcttcctaacagggcacatattcttccataatataaacacttttctgccccatctcccatacttttgaaggtcagttctatgacagtgaattttgcacaggagaagcagctacctgatttcttactttctctctccttatcatggagaatacagaaacattgtctgaaagggctctaaagaaggaactaccaaaacctgacttgaaatgccatttcttttaaccttccaaatcctaaatgtttccttcaaggcatcttaataaacttatttgcttctggttttgggagttcataagagagaatagaacaaaatacaggacatcaaatattagccatttcccattttattttatttttctatgtaggttcatgttccatgttcatttatttaagaaatacatttttattggtaagcttatagagctacacttatggaatttttaagtaggtaaataaatggttaagacaaaatagtgttatagccttcattctctgaataggccatctttgactcataaaattacccttactgtttattataacttcagaagtaatttatagttctgaacctatagtatcttttaccctgttcccaagcaaagactggtgactttatctgaaaatgattcctcttcccatgacctaaaacactgtgaggaaaaatcattcaagtggcatgccaagtccctatgaaggaagggctgctatcaaacctaccttttttgagcaaactgagactaaacttctctcttttcaaaattgtgttatcttccttaatcctattttcataatttttccttttgccagtttttcacattatctttgatatgtgagcaacatttattatttacattagagtataccttttagtaataaaatgacttgaaatcatattatttttaaaagccctttgcttctttcattacttataatctcctctaaaacaacctctgcatgttttttttaaataaagcactttctgtcaaataatggacttttttctaaacagaaattattttctattaatttgcaaactgatgatttcacttttttttacttttttttcgattatcagagtacttagtaaatgttatatagtttagttctaagatagttccagggattaaaaggttaagaggaaaacacaaatcaccaaatttctgatttatgtttttatctcctgaacaatattttctcactcatattcctctatcttatcacttagctaaagacagcctaaatttcccaattttctgtccaaaatatttgtgatttacttgtatataagccttctcatttgccatgtgctgtgatcttacaagttagatgttactatacctaccatttattcagctggattgctgaacacagttctggattcatagaattaagaatatcttgttagtgcccaggatttccacgttttgtgttttattggcccttttctttattcagccccttaatctattttcagtcttctggcacgtaatttttttcacagttattattcttctattaacaaattatttttatctttcctagtacattttcacttagttctcttgcccttaaatatctttcacatgcattttaggatattcttttcaaatatttgtaggacaactttgaatcaaaataaattatgttccttctccaatttgaagcattgaggataaatgaccatttgaggtctaactgatcttttcctgccagaagagttatcttacgttctgctatatttgtatttgggccagttgattgtaggttgtccaacattttttaatattgggaaaattatgataaaatgctttaaaaattaatatgccagattaaaataactgaatagtttactatttcattcaagcatgtttaaaacaaataatttcctttcaccagtttttcttagtaaactcctgaaaaagtaggaaaggtggaaagtatatatcatttttataaattttaaattgtacatcagacttttaaaatctgtaatatacaagcaagcaaaattattttaaatgacttaattgtatgctaatactcatctgataataaatgcttcttaaagttgacatttaactgctatcacaaagttttatatgtagaaaagtggggtccttttgaataaaagatcattcaactaaaaatattaaaatttatttcactggatggtaatgtaaccttaaaagcatcataataggtaaagtctaatattagttcccttaacaaaatcctaactgtataccagaattaggtcactgaaagaacttgatttgaattacgtttagacaaaaatgatttaattgtaaattcttaaaactttctaaatgcataattggcaaaaaaaaaaacccactgttaccagtgtaggaagttacaagaaggcacatactgaatgctgaagtatacatatgctatttctcttaaacctcagagcaaccatatgagcattgtaattaatattcccattttacagatgaggaaactgaagctaagagaagctaagtaatatgcccaaggtccacatctagtaacagacaaagctgggatttcagtctatgtctgcctctctccacatctctttcatccataccacactgcctacatgccatatgacaggatgtgtaatgggctaacgtttatttaaaaagttcaggccaggtgcagtggcttatgcctataatccccgcactttgggaggccgagccgggtggatcatgaggtcagacgttcaacaccagcctggccaagatggtgaaaccccgtctctattaaaaatattttttaaaaattaactgagcgtggtggtgggcgcctgtagtcccagctactcaggaggctaaggcaggagaatctcttgaacccgagaggtggaggttgcagtgagctgagatcgcgccactgcactgcagcctaggcgacagagcaagactgcctcaaaaaaaaaacataaaaattcagtcactatactctggcacaattttcatttgtatatgagccaaaccacataccttaatgatttgggaagttaggcaaatatgagatatgtagacatatctatgctgattgttgcttgagaaataattactaattctagacaaaactcaatcctgtatcttccatcatgaatcttaaaatcatttcacttcactcctaacatttcttacattgcagaactaatggtaaagtaaattttacggaaaaagttaagatagctttgggaacagagacctttccctaaattgattccatagcagatttgggggaattaacaaagaatttcagtctcatcaatcctttgaatccatcttcaaaacttctgcttttaataactttagaaaatttactaatctatagaactaattgagtaggatataggaaggatacaaggatataatgtcctttttataaaagtttagtatagcttctttacatgtatccacttgttccagaaaatgtgcattggttctgaatgtgaaaatatttaaagagagaaaggaacactcaagtaagtgtgggcttcagtgggaattatcacaaaacattggcaagtatttttatttaaattattttcaaatttgacttctacagccaagtggaattggtaggctgtagctgttacactgaaatttctagtctttgtaagtgcctcctgaaagtcatttaaaatggaaaaatatttcaatgagcttttccttttttcatatttatggacatgaatattttattggagatcattaactcctagaatttgagattatatttccatacaacattttataaagttatgttgaacttactacctgttatgtgcaggttattatgtaactattcacagattgcttcatatattgctttatcttcccatctaacttcttaaagttaaaatccggacacacatgttgattatctagaccagtcattctggaaattgtaacactcccacataaaccccaggagactttttcagaatgcaatgtttctaaatgtactgttactggcagtttactctccagcatataaggttgcattttaacttttagattatgaactgtgcaaactttacccaaaactatcttgcatgattccctcctaaatatattccttgattaagtaaatctggcaaatcactgtttgagctagttacataaaatttgttatcaagagaaggcttttctacaagtttccagattaacataaagaaaagagggaatcacagggcatttaagtgcaccttcccattactttccttaaatcacctcatagttaggctgggcgcggtggctcacgcctgtaatcccagcactttgggaggccgagacggtggatcacgaggtcaggggactgagatcatcctggctaacacgatgaaacctcatctctactaaaaatacaaataattagccaggcatggtggcacgcgcctgtagtcccagctactcgggaggcagagacaggagaatcgtttgcacccgggaggcggaggttgttgcagtgagccgagatcgcgccaatgcactccagcctgggctacagagtgagactccatctcaaaaaaaaacaaaaaaaatcacctcatagtttatgtctgacttactccaaacctcagttatctgatttgtagtctgtgtcaggaaagttttcttcatatctattctgtctccctcctctttgattttaaatttttttcttttacccagtaggacaaaaaagagcagttggtcatcatccccaatattcttagtcttcagtatgcttcaggcctctcaatgaacacttaagtctcaattcttcagacaaaattgcttaagctcttctcctcagtcctattttaatgactttatatttaagaatatagaattatattttcttttatattcaaattcattactccagttaagtaatagtttgatagtttgatagaatcgagagttaagatgtttctatttgaaagtggattcaaccatcagaccaccagcaaatcggcacttaatttttgtgttatctaacattttctattgtggaattttatgattttatattctcattagttataactaaaaagccatgcacacagaattgtatatcattttgccattaaaattttttaacatattgcagcaagcttagttttatgattgagccacaaccttttacatattttttgtatgaaatattaaacactaaatgcaagattaactttcaaaagcaaaccctacattaatcaggtattatctatggacatttttgtagaccacttttgaaatacttattattttgcaacatagactggactatacaactttcatttaacttttaggtgactgatttaagttgagtgtgcatatagagaaaaacctagaaatttatctcatggcagatacatttgaaagtacttcagaagaatttatgctgtatattaaaactaggctcaaaataaatctatcgtatctttaaaagtccaattctgttattactgtgatgtttgtagtgttactattaaacattgtgaacatacacatttttaaaacaacttgaaacccattttaaaatctgggtaagagagaaggaatcttcagaacaaaatcacatcattagggtgtccagtttatgattgaatttttaagcaaattactgtatttgaaactacaacttgatttggttttcagttttaaaaggcaacatgtgggttttatccattttatttatacctttagatttcagaaacatcttcatgttttagatgcattctacagacatcatgttacttaaaaactcagggcccctttcatccctttgtacactgaaaaagttcaattgttagcaagtaagcaattagatccagttgaatatttaaagtgtttgttgcacagttcatttaatgtttcatcttatttgactttttcacatagatataatatcagatttcattaattataaaaagttgcccagttctgtaattactgaacagagggaatgactcaactaattggctacatgttgcaacaaatttaggcctttagagttgaagcactgacttaaaacgacttacatttctgttctttggtcaaatgaccatacatgatatgggacaaattgtttcattttgtttgttttttaataagggaacttggtaaagtagttcctgtcagataggattttctcaagagacaatttaacgttataaagccttctaaaagtgaactaaatattttataactttagtaatagcttggatggttttgagaaaataacctgtatttatcacattgtcaaacagaatttttctttgaatcagacaagttcaagctctaaattgatgtgctatatacttaaaatcctaggaagttatctgtaaccagtctcttgtctcaggctcttcaccttgttaccaatcctcgtaagtatgtaaaggaaacatatttttaaagaagcttaacagtaagaaaaaattactaaaagatgcaattcaaagataggtcccagtttaacactgaattgcttgacttctgtggcttttctttttctggccacatttatttatttaagcaatttttgtatgccttgttatttcatttccatagagattatattgtatcagtgtttatgtaagctggaatcatcctcagttttttgctgataatttttcaaataaagatacatggataattgtaaaatacactaactcttagggtgttgtagtagctgaaacatggagatgcgtagctgtcatgctttttctgaatggacaggagaaacataagctacggagtattcacttctgaggatgcttttccggaaaaagaaaggctagaaaatactcgcacttcctcagaaccctctttcttgttaacgggtatcttttgttggtgtgttttgctcttacattacagatagactatcatatatgactttatgaataatttcagttattttgcttttgtataagctgtctgaagccttgctatgctgtataagttgtgtttgatggatcagtgtgagtataaaataaagcaaatcacttttcttttgtattatctatggatgccactatgaaagctgacattaagccactaaagagttttctatgaataagtgtaagtaaatgctttgatatatataaacctaaataaaaagattgtattgatacagagacattggagaaggagattttaaggcagttctttaggtttaaaaaggcttgctgtaaaatggtgcgttattccgtttattaaagatcatattaatgacaatagtaattgtgtttttttattttaagaggtcaccagaaattgttagtatgataattagggagtttgcactagaatagtaaatgttctatctaatatgactttcataactcagtatgatacatcaaaaaataaaaaataaaaaaaaataaataggccgggcgtggtggctcacgcctgtaatcccagcactttgggaggccgaggtgggtggatcacgaggtcaggagatcgagaccatcctggctagcacggtgaaaccccgtctctactaaaaatacaaaaaattagccgggcgcggtggcgggcgcctgtagtcccagctactcgggaggctgaggcaggagaatggcgtgaacccgggaggcggagcttgcagtgagccgagatcgcgccactgcactccagcctgggcgacagagcgagactacgtctcaaaaaaaaaaaaaactaaatttagtataatagttgctattttctgaccatgtattatatgccaggcactgtgttagttattttacatacattgttgataattctcacaacaatcctacataatatgtattactatcccccttttataaatgaagaaactgaaagagaaa

SEQ ID NO: 4 - DNA, 37600 bp, Homo sapiens
tgtgtattttgcaaatatggcataacctgttggcataaaattccattgttccagaaaatatcggtaataaaattatagaaaagttaaagatcttcatttcttatttcgaagcgtttgggagacatttcagaaacggatgggaaatgttaaattctgcatgcctgcttaagtttccatccacaccgactagatgtaaacgagtgtcaccaaaagtacaccacaggcacccacacagattccttccataagggatccacaaagtttagatgtgaaatgtacctaaaggttcctagccgtctttcatccctccctctgtgaaacagggagacacatgtgttttaaggcagagatggaacttgggcgatgggcggggggtgggggaggtgggaagggacggcttaggacagggcaggattgtggattgtttctgccgccttggttgcccatactgggcatctctgcaggcgcgtcggctccctccacccctgctgagatgatgcactgcgaaaacattcgctctccccgggacgcctctcggtggttcagagcagggaaaatgttgcctcaggtttaaaataatctgcccaagcaccccagcgcgggagaaacgttctcactcgctctctgctcgctgcgggcgctccccgccctctgctgccagaaccttggggatgtgcctagacccggcgcagcacacgtccgggccaaccgcgagcagaacaaacctttggcgggcggccaggaggctccctcccagccaccgcccccctccagcgcctttttttccccccatacaatacaagatcttccttcctcagttcccttaaagcacagcccagggaaacctcctcacagttttcatccagccacgggccagcatgtctgggggcaaatacgtagactcggaggtaggcatccgtgggggggcgccggctcgggcgtgcggggagtgtccgcttctgctatctgcctctccaaatatcccgactgctgccctggccccagccctctctccacttcggagcactcctctggcgttggcaccgctgaggaatgggcctgggcggggaggtgaagagaagccaggaatgttttatgttttcctaatggagagggggcctagggagcccctgagctaggaggacacggaaaaggggattggggtcctgagattgggtctgttgggcccaggacgcgttttctggatgggtctaggatgctcccttgtcgcgggacccccgcggtccggccctgcctgctgggggttcgaagaggtggagtgcagggtggaggtgttatttacccgagtcctggggacagtccccgggactctccgccaggcgcccagaccggcaggtcccgcaggcggcgcgcggtgtgtttgcactttccaaagttcttgaaccatctcaagaactccttctgcatcttggcgtctggcaggggtgttccgagagaggtagacctcccctccccaaactgccaccatcacttccaacgccctccacgcgctggagctctgcccgggtgtggaaacctcgtcttccaacacgtagctgcccttcagccacccgcccgcagcctgggagtgccctgagggtgggtcgggggagctgcgcaggtgagactgagttctaggacatttagggggtctggtgcctggctccgccaaaaatggggactttcgggattgtgatcatcacggcggattgagcagggagagccgtggagggacaagagagggccgaggcagggtggggggcgcgggcaggtgcgagggggatgcggccaagaagcagcgataaagggaacattccacgggtcgggcggctgctgttggatcttagataaagctggaagggattaccggggcaggggtaatagggaccggggacgggaacgcgaaacaggtgaagcgctcagggcgagagcgactcggcttagggagtccgggagaagcctgcggctgccccctcgccgccgaggtcctgcgggtcctgcgggtcctgcgtgctgagccggggcgtgcgcgggcgggggccttcggaccgcgcggcggggcctgccctgacccctggcggcgggcgggggaggcaggcgcgccctgcagagtacagaggggtgtggtgtcctctgcgagatcctcttaaaaagctggctacgcgcaggcggtttctgtgcacggagccgtagctgtcggagcggttagttcgatttcgagctcgaggtttcccccgccgccaggctgacttctcatcgcttgtttttctttttgcatttttcctcccaccgccgttgccgccctccccgtcctggccgtccgccctccgccctctgcagggacatctctacaccgttcccatccgggaacagggcaacatctacaagcccaacaacaaggccatggcagacgagctgagcgagaagcaagtgtacgacgcgcacaccaaggagatcgacctggtcaaccgcgaccctaaacacctcaacgatgacgtggtcaaggtaagccaaggcgaccaacagggaagggctgggacagctctcctctggcagttagcccgtgcatccttctttagcattgccgtgtacgcacaccccaccccgccccctacacgcgcacacacacacacacacagagttttgtgggtttgatgtgtgggagctcccgcagtcggcagaaacgttacatctcccttcccccatctccccccaatagttagttcagctgaaattcagctaaagtgagttttgtagaagttcctataactacacttttatcctagcaaatgagcctattgacctcagcaacagacggcccatactccttgggacggtgagatggttcctatccattcccaggttgaaagtctagtgacaggtccccactgcacgtggcattaagacagtcagataattgtgtcaggtcttgtgctgaggatgagtcagaatacaagatgggcatgttcccccaactaaaacgatgggaagtgattttcttaaaaatactacagtggatggaaatgcctaggactaaagacaaagaaaatacgtacttattcatatacatatgaaagttactttaactagactaacaagtcacttgtgcacaactaagcaaatttacaaaaccaaaaacaatgtatgcctcttggtttcttctatctatggacacctgcacttagatgtggaaagctgcttctttagtagctacctgggtcagcctgccctgagctaatggcacattcaggttggagttccttttcatactttcaggatgtgcttggtgagattaaaaataattggactgggttattggccagacttagatctgactcagtggtcagttttaaattatcattgttattagattttgacccttttagccaatctagtgggaggaatttattgcctaaacacatctggattgggatatcatgggctagagccatccttggcaaagggttttctctgagaaatggagggctaaggaaaaatcctggctcagggactgcagtgtgaagatctactcctatacaacccccagcaatcaatgaggcggatgagcaatttccacccaccacgcctgctatctatggatgggaggagctatagttcacaaaccgtttacattcatgaataatatatttcaaaaggggaaacagtttaatctgtaactggaagggaaaaaaaaactgtcagaattgactcccttggcttcctggagtaggaaaaaggaaaattggagcatttgcagctttttttgactagctggattatggaatatttaaaagcaacagcaacaaaagtaccttataaactagaaaatagaattgctaaaaaactatttactaaaaacattaccttaaagggagaggatatttgtgttttcccccacccccacccttctcatgtggctttgaacaagaaggagagttgccaggaaaagaggcagatttcagagagggctggcttcactggatcctccctgttgttccactgcactgtgagtgagattccctggagcaagcgaatctcccgggatgagtcagagaggccaacagtgtggatgtgggtctccacacatagcatgactaagttgagaaagaaaggccccactgggaaaagagacttcaacacagatggaaaaaaaacataacaggcttggaggaaatagcagtttacaaaacagcatttcaaagagcaagtgtggggatcctcaaattaaagaaattaaaagaaaaagctagagcaagctcctgctagcctaaagaaaccaaaccctgactacttgctcatagaactgtgagcaaaacaagacagtcaaaccaaaaaatccacctagaaaagaatttggcagtctcactcagatgcctggcctagaggggacttcagagaatgccctacagagagacaccaagactacaaatgcaaattctgcccaaagagtgcctggccgatgaacagggtcctatctacatcttatggagactcctattttataaatatgtatcctcaagtccaagcacaaacaaaataacagaaacagggatgattctctcccagtttccatgacagtaaataataaatttccctaaattttactttcaacaacatagactttttttatttttatttttatttatttatttatttattttttgagacggagtctcactctgtcacccaggctggagtgcagtggcatgatctgggatcactgcaacctccacctcccaggttcaagcaattcttctgtctcagcctcctgagtagctgggactacaagtgcacgccaccatgccgggttaatatttgtatttttagtggagacggggtttcaccatgttggccaggctggtcttgaactcctgacctcaagtgatccactggtcttggcctcccaaagtgttgggattacagatgtgagccactacacctggccaacaacacagacttcttaaaaaaatcatgacaataattttgggtgcttcttaaaagcacccaaagctttactgctaatgcatggtagcttaaaacttcacataataagaaagaaccagtggccaatggaatctactgttaaaggtacccaatcaagtaaggaaaagttggtcctaaaagcaagcagccctgtaaaagctgctctgtccaatatggtaatcactagccatttgtgtttccatttaaatttcaagtaattaatatcaagtaaaatttaaaattcagttccttagtcacactagccacgttgtgagtgtgcaacaggtaaagctagtggcacagacatagaacatttccatcagcacagaaatctctattggacagtgccagattagggtgttctctgcattgtaaaagcatccccttgccaagttaaagaaaacaacaacaaaactctagagaagaaatgaaaccccagtttcatttctggagaggaaagaaaactcatgtgtggcatgagtttatattcaagaaggtgcagcattattacctattttactagtaataatgacacacattatagtatacaatccagttccaataaaattaatttctcatcttactaaaagcttgctgctccacattatgagacaatttacccaaatatagacatttacccaaaaatattaagtagcttgtgaatactttttaaaatttcctttaattaaagtggtcacaaactcaaacccttcattctccctctgagatttctgtgtcatcttttgttcacattgttattcacatgtttattatgtacttattttgattttctagataaataaaatggcttcaaatctataattctgataaaattagccatcaattaatttatttattaaacccatgcaatatgctagattagatgctttgctatgtaattcctacaataaatcctagcaatcacaaagattacagttagtgagacgacatgcacacaggtaaaaagtgtttttaaaaaatacatacatacaaccaaaacagtaagtcactgctacatggaaactgattggtcctttttcctttttttttttttgccttgactgccaggaagcagtttcaaatctatagctggattttaagtttcattaattcatgttcccacatatggttctgtattttcacttcccccttttaactgacatactgtcttatgtgatctctactgtaagccttctcatcattttggaaacagaccaaatataatatatatgataaggaatcaaaagtaaatacagtagtgttgaatattgcataacaaaaaggtttttaaatagggaatggtatcaatatgaagtgttagggagacccagccatgaaaaggatagcagggtcagagaaggaggatgtattgcagctggtttaatggagaatggtatgaaggaggtgcagtttgaattgggtcatggaggacagatggattgcaaatagctggggcaaaagcacaggaaggcattctaaacgagccaggcatggagacaagaatgtctcccacaagggagttgtagtagctcaatcagactgggatttgagatttcatgtggcagagtggtaggtgataaaggtgaaaagactgatcatagtaaaatgcggagtctgtaaatccagcactcatgataagtttggacatcatgtcaacagtggacagccataaatgactgcaagcatcggtgtggtataatgaaggtgacgtttttgtaaaatgactctggtgaaggtacagaaggtaatgaaaagtagccagtctagttgagcagaaaagagttcagatgtaattgcatcatggtccagatgtgaaatgaagacaatgcgaagtggcattgtggatcgaaacatacatgcacaaaatgacagaattttagaatttgaagggatcatcatggttaccaggctggcctccaattcctcttttgtaatattaatagaaattaagggctaacaagtttaaaatgttatccatctttttacatagttactgcccaaagtgaatattttgaaatgtatcattaaagaagaatagataagattatgtgattcaccatggactattgtcatgagaggaaaaatgtgtttagatgattctgttagcactgagacaaatcaggatatctgaaaggaggtctttgttgaaaaacagaaatatgcattcataacttgcttttctaaaattggaatgtaatgattcttaaatatgcacagacacaaatttttctttaacagtcaagaaaatgcacgcaggtgataatcagatcagttttggttatagtacaaaggtttaatgcctccgtgatccctttcaacttgaaagcattctagagcaattggtgattaatatcagtataacagtcatttataaaattattatttatttgatatacatctaatcaaagcataagatttatttttattattattattatactttaagttttagggtacatgtgcacaatgtgcaggttagttacatatgtatacatgtgccatgctggtgcgctgcacccactaactcgttgtctagcattaggtttaaaagatcagattgtctcggcaccatgttaatatctttttctgttggcattagtattagttttgcttgtgtatttgtttaggagatagcttcacaagttggtgattgatattctaccatgtatgaagtcatgcgtggaattcagaatccccagcttgtaaaattgcattatgatcatctttagtgggaaattgttctcagaatactgagcaaaggatgataccaaaatggcagctattattcattcttaagcatatgaaatgctttcaggttcaacccaaaattacatacattttaaatgcttactaaaagagtcttttccctcctccatctattaactgcaatcaaaaaacttcggttttaactgaacatgatttcatattatttattaaaatttaaggcaaggtgcaccaagtacccttgaattatgaaaagcttcatgatgtgggatattctttcagttaacggcagggttggctacacttttaaggggttcaaagtaggaacagctgcaatagtgagctgcatctggaaagtccagtaatttgaaaaaccacctgtttatgtatcctgcccactcaagtccataaaataacagacactttcatattccaaatgaaactgctttttagtttgccctacttttaaacataactctttgtgatggaatgaccagaaacagctggtctctaagaggacagggctatgtgcgctcacctgcggggttggaccttccataatccccctggctgtggggaaagttgagggctgctgtctttatacaaagatggtttattccaagatacacacactcttcttccacaccctggagaccttgcatatttagtatcttctttaccataatctgaggccctagagaaaaagatttgcaaactatacttgttttaaaacaactttctaaaaaagacactctcagcccctagaaattatgcctaacacatagatgctcagaggcaacctgttgtagtgcaagaggattgtgccaagattagaaaacaaatatttgcaacttttgtaactgtcttctctaaaacttgaatgtggtgattctaaagtaaagaccgacacaaaattctttttctttagcagtcaggaaaaggcatgcatgaagtaatcagatcaggtgtggtttcagcataatggcctaatgctttcatgatctctttcaactggaaagcgttctagtcccactggacaccaaggaggaagaagggacggaaaatattaggcccataggtttatcttcctcagtagtccacgagatttgagcttatatgtagggagcaaaattgtttgtctaaaagcagttaataaatgccccaaaaaggctgggcgcagtgactcactcctgtaatcccagcactttgggagctcaagattggtggatcatgaggttaggagagcaagatcatcctggccaacacggtgaaaccccatctctatgaaaaatacaaaaattagctgggtgtggtagcgcgtgtttaatcccagctactggggaagctgaggcaggagaatggcttgaacccaggaggccaagattgcagtgagccaagattgcgccactgcactccagcctggtgacacagcgagactccgtctcaaaaaataaaataaataaaataaaataaaataaaataaaataaaataaaataaaataaaataaaataaaataaaaataaaatgaacgccccaaaaatattttgggcaaactattttgtgtttcttttctttatttatttatttcttttgagacaaaatcttgctctgttgccccggctggagtgcaatggcacaatcttggctcactgtatcctcaacctcctgggctcaagcaactcctgagtaactgggaccacagggatgtgccacaattcccggctaattgttttagccaggatataaatgctgcctacatagagtttgtagctatctccttgactttctttatgcagattccttcacaaacttttgatggattcctttaccaaattctactgtctgttaaaatcttctatctttatatctttagtccaaacaacacgtcatttataaaccttaaaattgtttctgggcaaataaacaaggcaaaataggaatatatatttttaggcaatttacttctgttttggtctcataaaaaattgtaattaaattgtagaaaatatttcaattcctctttaatatcctctcctcacatactggctctcaacttctaatcctcctattgaaacattgattgggaggccaaggcaggcggatcaactgaggtcaggagtttgagaccagcctggccaacatggtgaaaccctgtctctactaaaaatacaaaagattagctgggcatggtggcatgcacctgtagtcccagctactttggtggctgaggcacgagaatcgctttaacccgggaggcagaagttacagtgtgccaagatcaagccactgaactccagcctgggcgacagagtgagactccatcacaaaaaaataaaaataaaaattgaaatttgcagcctttttaaaaccccatagcctctttataaacccaaaagcactatcaaatttggcgaggtgtcaaaagaatcagaggaatgtttacaaatacagatgcctgggcccacctcagatatatatatatatatatatatatatatatatattttttttttttttttttttttgagacgatgtcttgctctgtcacccaggctggagtgcagtggcatgatctcagctcactgcaagctccgtctcccgggttcacgccattctcctgcctcagcctcccaagtagctgggactacaggcgcccgccaccacggctggctaattttttctattttttagtagagacagggtgtcaccgtgttagccaggatggtctcaatctcctgaccttgtgatccgctcgcctcggcctctcaaagtgctgggattacaggcgtgagccactgcacccggcccagatatattaaattagaatatctagaggtggagcctgagtatctgtatttttcagagtttcaaatgatcgttcttcaaatgattacactgtgaagtcagatttagaaatgactgtacccaaggttggctaaaagatacacaccctggttgattctacctgaagagagcaaataagatacacagcaaagttgtagatgttttccctgccagtagaatacttgcgggttaggccatttaaaaccctgccagagagttttgaaacactgtggagggctcccaaatcaacttgctcaatggttctccatcccttcaggctacttgggcttaaagccaactgcaagcttagagcctcagagtgacctaggaatggggtgaccatatattctaggttgtctcatacagactagccagcactactcagccgcaagtaatagcatccaggcatgctcagaagtgtcccatttggaggaaaaaaacaatattgtcacaaatgaattggcaatggcctgtctctgattcttatacctggaatatactggaagtccctactcatgctattttctagcagaataggcaaaatttctacattccaggcatgtcaggcctttccctgattcctttctctaatgtcactcgtctgctgtcttttatcacagccattaaactgcaccctaacttaaagaggatcccttatgttccaatctactcatccctcagatctttctttctctgaaacacagggttaatgagactgacatccttccatcacatattttctcagctactcagtaaaagatgtaaatgtttaaaatagtttaaactatttttcagttagtccaggaaacataaaatggcatgcttgcacataaaccattgtttagggtgggggaagtgtttttaattttgccttaaaggaaatctgcatgatccacaggctatgcaactaccaagggaattagttggtagaacagaattacacctgcacagaatacaaatttcctgcctttcatgggaactatgttgatgtttcagatatgaaatacatcttgttttctttattgaacctcgagaagatgtctcttgttggtcattatttcatggcaggggaagtacatattcctaaagacacaaccgagtttccctttaaccatcattagttgggctggccattaagaaccagacgcttttattttcaaagagacttaagttttgatgttgtacatatgtgcctaatattctatctcatagcaatttaaaggtgacgttttaaaaagctgcattcagtgtataaacttctcctgatcccagcaaggatgttgtgatgattttatttaaaaaggtaagttgtgtctagatatggcagtgggtcatctcatgcatggtgcagatgtcaaacacaattacattttcttatttgcaatgactaaaaaaagaagctgagcccaagcagtgagaaagtaggagattgggaggacaagaagcaaaggaaaaaagtaacatgagcaccgttctccctgtcctgccacttgctccattatggactgggctgcgatatctcatatcccagctccacaactcccaacaaccatttatgtgcatggtgcttccatgtgtgatgacccaatcaggctcaggtgtggactgagtagttaaattataacccttgtctctgaagagtttagggcttagtggggaaacagacatgtaaacaaacctgagtgaggtcatgtaatcaaaggacaggccacagtcaaccacaaagaagagagttctcagcagtctccaaagccgaacatatgtttaccaggaacagggtcccagcagagggagcaacaggagcaaccagagccttgaggggtcgtggcctgttctgggcaccagcagtggatcaatgtggccagagccagggatactagcagaagccagagcagcagggccttccttgtccagcaaaggcatttgtctctttgtaggccacagcgacccacagagggctttttaggccagaaaaaagccattaaggccgggcgcggtggctcacgcctgtaatcccagcactttgggaggccgaggcgggtggatcacgaggtcaggagatcgagaccatcctggctaacaaggtgaaaccccgtctctactaaaaatacaaaaaattagccgggcgcggtggcgggcgcctgtagtcccagctactcgggaggctgaggcaggagaatggcgtgaacccaggaagcggagcttgcagtgagccgagattgcgccattgcagtccgcagtccggcctgggcaacagagcgagactccgtctcaaaaaaaaaaaaaaaaaaaaaaagccattaaaaagggagtcatgtctcttgttggtcattatttcatggcaggggaactacatattcttaaagacacaaccatttcctcttaatcctcattagctgtgctggcaattaaaaaaccaaaagtttttactttcaagaagatttaaataacttctgagggtgtacatatgtgcttaatattctgtctcacagtaatttaaaagtgaagttttgaaaagctgcatcctgcgcttgtcagaaccatgtctgatgagatatcccctttaaagggctctcggtgcaatggggcaaatcaagggggtttgtgcaagtgggagtgagacaggagatggggtgcttcttccagcactccctataggctgactgagtgacaaagatcattttactgacacctccaatggccctatgagatgggtactattattattatcaccatcatattccttttgcagataaggaaactcaggcttagcagattgccagaacaacacaggcaggaagtggtagagtcagggtttgaacccaggtagtgaaactccaaagcccggattcttaaccactgtcctccagtgcctctctgtaataagtcatgatcccagaagccattggtgtggccacaatatggaaagagatgacagtgtcctcacactgggtgagcagcttatggtgattccagacatgatctctgttgggagtgacaggtctgagcttctaggatcagaccctagatcttggcaagtggtttgaggaaagagaaggaccaatgtaaaaccccaggcttcaaggaatgtggatgctgggcagggaggattaagccccaaagaccagaaatggggtacacagggcaggtgtggccagagtagaactagagtagaacttccagtgactagaaatagaaccagacacgttgcagtggtggataaggtagaatcgcttaagtctttaaagtgcccctgatcacccaagttggccagagaccctggggtggggctgattctgtctggatatacggggaggggtaagcatgaggaaaggaagcaggtcctgacaggtactttgcactaaacagctccttataaggttctcaatttgcctgctcaatttctacagacatttgtgggaccacaccagtacattgtaaaagcaggaaacaattgagaaaaacctgagttttatgttggtaggagaaatgcctatggaatatggcaaatcgtttctctgagacttcctccctagtaattacatatttgttctcaaaaacaaatgccagaaggaagaagcagatttaatagtgcattttacaaggcaccattaatctctaagaagaacaattaaaatgtctcagcaatcatggttcactgtatatcttttctatcttcttagaagtaatatatggctggaaatgggcataccaaaatatgtcaaggaagtggaattgcgttcattagatttcaccactaattattttagttagcttcacagatctctcttccttgcttgttcttgagagcgaggctttttagtaggaagagaaattgtctaaaacgattaataaccacaaattcaccaaactattttgggtaagtccctctatttctctaggtctaaagctaggaataagagtcattctcatataatgtactgtcccagaaagggcattatattagtctgttttcacgctgctgataaagacatatccgggattgggtgatgtatttaaaaaaagaggtttaatggactcacagttccacatgcctggggaggcttcacaatcatggaggaaggtgaaaggcacatcttacatggtggcagacaagacagaattgagagccaatcaaaaggggaaaccccttataaaagcatcagatttcgtgggacttatcactaccacaagaacagtatgggggaaccgccaccatgattcaattatctcccacaaaatgggaaaattatgggaactacaattcaagatgagatttgggtggggacacagccaaaccatatcaggcattcaaccaatatttgggaagcaccagccctgcaccaggcacggagcacgtcatgagtcctgccgtaccacagcctgcctgacagacctcagtcatcctctggagcttgcctctgacatctggacctcctcagaatcagcatctcttctccttgcccccgccatcctttgtttttatctctgctgtggcattcatcaaagccttccaactatcctgcgtcactgtccttcagtgtcctctctcctctcccttccttctcaccccactttgtgcctgtatccttcaagcagagcaatggcaccctcacttctgtggctgcccagtgccccatgcagagtcagacatcagaaaatagatgctgaattcagttgacactctgaaattctttttaaagtaagttaatgtgtgctttgaatgaaaagacactgggattacattattgagtgtctttcttcctttgccacttttgtccctattggccatatttgaaaatcttgttggaaaaaaaaattcaagaacttaataaataaattcaaaaacatttagtctatttacttaggtgaagagaaaactcattctaatatgtgtgtatatttaaaatatttgttatttagactttttttttaagtctccaggttgaggaggacacaaatatatcctcctaaaccttccagtaagcaagctgtggcatccagatgatctcctgggtcatgggggataaggctaatctcctaggtgtctggcagacaggacaggcaaattcccagaatgccaaaatataccatctgctgctgtttggcattgcccttaagtccagagtgtggaggctgggggtgggtctctggctacaggagaagtcccctggcaagggaggggtgaaaggagtgcctgttgaaccccccatctatccccgcactatggcaagattgagaggaatgactagatcagggaatggcccgaaagaaaaatccaaaacctcccaaccctggacaaggccacagctttgagaaaccgaagcctctgcttccttctctttggctttactgcttctagatgcaaatacacagagctctgagattttgtgtgctgggaggtgataactgttaaccctctattccaatagcacagaaatttctctttgcctcagaagtggtttctcatagatctcagatctcttttcaggaaaaagaaaaacaacaacaataacaacacattaatgactctgaaagagtcagacaccattaattccattattggtgtctgtgccaagtgaaatgaacgtcagctcttttcccagatatgtttccttcttttgcctcctataataagagatgattttactgtaataatataagactcatcaatttgactccaaatagctttcctatcaacaggctaagtgtaaaataccaggatcattattcagttgagaatagatagaactaggaagtagccatcaaaaaagaatgatgaggtgcattgtggatttggggtgtaacttggtatctaacatacagccagaatcacagtcatagcacacttaatattttatcagaaacttgcgtgaacaagttaagaggactctcaacttaaaaatgacaccaattgcaatgatcttgttaacatttgtgatgaaaataatagcaaagtgacttagacaaattacaatagcccataaaaataagataaagtttaacacaaagtaagatgatgttaaaagacttgaaataaaacagatatgttaagtaggcaacacataggtaagcatataaaaacaagaagataccaggatagagctgtcatttttgtgggagcctgtgatgtggaaaaccaagatgcctggtgagtataatggatatggaaaccccccttgtaataattccacagttccaaggggccaaggtctccaggttgagtcactattgtaaacacacccatagatgaatccacatgccatacctccttgagtaagtggggactcaaactaggtctgtcaattgttccagaaaattaagcatctaaataatttaatgataatttaaaagaagcacaatgaaatatttcaaggaatgtcacatacaagattctgtacctcttctgctttggttagactcattcagaataggttcctgctttgatcttaagagggaggtagagattctggagaagccctagggaagagcaaaaggaaaggaataaggagccaagaggaaacccagggtaaggctgaggagggactgtttcgtgtaggtgatttattggaagggttggaaggaaacatggaatgacaattacctttggttattgtcaggttagtatgagacttacaagaaaagcactgctcagacgcaattaccattcaagataagaaataataggaaaggctagcacacttagctttttatttaaaaaagtgttaggtaggctgagcacggtggctcactcctgtaatcccagcactttgggaggccaaggtggatagatgacttgagcccagaagcttgagaccagcctggacaacatggtgaaacctcatgtctacaaaaaaatacaaaaattagccaggcatgatggcatgcacctgtagtctcagctacttggggggccaagaggtgggaagattgcttgagcccaggaagtcgaggctgcagtgagccatgattgtgccactgcatgacagcctgggcaaccgagtgagagcctgcctcaaaaaaaaaaaaaaaaaaagtgttaggtgacatgagagaagatcttccaagtaataagagtggctaatcccaggaatgtgtcaccagaggttattttgtaatagtcgtgtgttaaattccttatttgtctatataacttctcaaatccttctgcctctacagttatagtttaactggcgcataacagccttcacacacagcctcataattaaacatagacatacatatgaacactttcccctatgccagcaggatacttggtttgtttaggggcaaagaggaattgatgtggcgttgtttcaatcagtggttgaaaatgcaagtggtaaacattgaaaaatagaacactgcaaaaggcatgcattgtatataccaaaaggtcagcatgaagcattatctgtatggcaagcctgcccatccactccctcctacacgttgcatattcacacagttttgcagcttgtataaacccctattgtgatagaaactcatgaaagagtgtggtctctgcgaaagctggctgttctgtgaatttagaccagtggttcttcaccctggctgcaaatcatctggggaacatttaaaaacactgttttaaacaccccaaccctagaaattctgatttaattggtctgtggtggggcccagaactctgtattctttttttaaggctctcaggtgctgctaatgtatagctaaaattgggtctggtttagactctcagaatttcttaataattaaacactttatcatgacaagactttcaggaccttaaaggccacagtggggtagttatcatttcactaggtcctcatctggggaggtccttggcatttttactggaatatatttgtcactcaaatttctattacaaaaaattctttcttgcacactgctttagcaactacatgagatatactttgtacatagcacaaatctcatatcacttatgtaatccagctctgtggttccttcctttcctttgcctgtttatttttaattcttcccaagaggaagcttagccagttagaacaccagagtatcatccccctcccccttttcccacctgagttcatggcttagacatactaggaatgaagctgacaacatgcactagtttttttcgaaattatgcagcaaaattcccaaagtgcgagtggccacagagatcttcacagggcccagggacaggcagacatcattctttctccagttcctggcacagaaaagagaccttaggttactgagaagataccagtccctcctcagagcagacaaggaaactgagcctcagaatgaaagactgaatttcagtcctttcttgaacatggacctccagggttatattgggccttggaaaaggcacttacactctggactgtagtttcttcatctataaaatcaagaggcagaaacagacaatctctaagttgcctttatttataaaattccgagattctagttgaccagtattcatacaagagttgaagcctgtaagagtgcagaaagcccacacaaagagacagtggaagacctctcatcagtagtatttttattaccctcttcctaggttttaccagtcaacatcctcactgttaatatacagaccgtggtatttaattaaatcatctttgaaatactgagctatcaacagatggcatgctgaatgcaaaaggaccacaaataaatatttggtactgaagaagatcaagagttggagttcatttcccattctgatctgggctcagaactctgtggtcttccctctaatcatccttgccaccaaattggctgtatctgttctaagatggatcagaaaatcagttccaaagttggctacaaactttcaggtttgggttttgttttgtttttttgttttgttttgttttgtttttgcaaccagccaattcatcttagttcacatgacagagaagtgcataattacttgcaactttagttagagcagtggccttaagaaggtctagctaaataaaaagtgctcagactttctgagtgctgacagttgtcaaattcacctagttcacatggccccatttctatcgtttgttttgttttgtttttgttttttaacagcccatctgtgagcaataggatcagatgactaagagctacagggcagaaacactgttacttagagtcaaattttcccattacctagctgtaaagagtttgtttctctctgactcatataaagtttaccatttaggcccctgcatgattttaattccatcacttaacaccccagccatatgattctgaaggtaaacatgaaggcgtttgaattccagaccacctaaacattcttaaggaaatcatcatctccacgggcagagctatgccaaaatctgtaggttttaactcaaatttcatgataagcaaaaattgaattaatttgtcttccattttgttcacctttttgccaaaattatgcctggattagaataaataaattcaatcaatgaatgcaatcactaattcttacgccagataataacacattcagaattctcctttccctgggagattttatcaggttagtgttcttgtaaacaggagaaagagaaaaatataacttagtaaatagcagtattcactaattcattcatttattcaacaaatattaatttactacctactacattccagggagcttagagtctagtatcagaaataataaccacacacacacatacacacacactacattaaataaggatgtgataggctagatgaaataaataaataaataaaaggtccaggtgagaaaagaaggtgggggctagaaagaagtcattgaagaaaaaacatttaggttaaaacattatgaataacttagagtgagccaagtgcagagtgctgaaggagtgctccaggcaaaatcaacagcaaatggggagtccttgatgtagaaaagggtttgaggaattgtcctgggagaaatactcaagattccagtctgaattctagaggttagtgatttagagaggcaagtacgaaaatgacttcctctcttaccttaaaagtaagtgcaccatagaaggaaatcacccttccttggtaataattcctgagtgagcctgagaagccagaggccatctctattttataggcactgtccccttttcagttacccatggctagctcattgaccttgtcctggtcgtttcctcatttcacttactccatcctcaaaacgtagacgcttcataaatattgtataaatgaatgaactcacaaagtcacagtacagcaaggcaaaagtgcctgcaataaacaagcattctaggctagaaatatttctcaacttcaaattgtgtcttattacattgtattccgattttctagagtggtagttctcagtcaagggaaagtttttcttcccttccaggggatatttggcattgtctggagatagttttagttgtcacgatttgggggatgcttctggctcaacttgggtagagaagcggggatgcttataatcatcctacagtgcacaggacagtacccccacccacactccagtaatgaagaatcattagacctaaaatgttaatggtgtccaggtagaaaaaccctgttgtagaggttggggactgcgtcttgacagccacattatacagtgtatcaaacaattctgtataatgggctgtaattatccttgcctagattttgcaagaaccctagtgtgtatctttttcctcacttgccaagcaatgttcaaacctgcagagatttatttcattcattttctgtgtgtttagtaaacagactagaagcactggaggaaaaaatattccagcaatgaggtaagacgaaagctattagtaaccctagtttaacttagctgaatagtaggaaacaacctctaccgtgaggaagtgtattgtagaaactgaaaagacgctaatgatgtttaaaaagctgtagttcaaacaaatgtgcatgcagaccaatgggtagactgaaaatgatgaagacatttccgtttcttgtgtctttgatagaaaagaaagagcttttattttctttagtgtggcaatcattcagatttgtcccatgacatgcccagaaggttgaagaataacaaactcccaagtgtaaacacagaatttagcgaagaatccaggcctctggatgaatccctgtaattgcatgtttggataaaataagattttcatacattaaacaaggtaggatttttctatctgggacggaactttcaacacttggaggggttgtagttatttctcctcaaagatggcaaacatgagtgccccgagttatccctcctctctgttcaagttcgctaactaatcacccagtatccatgctatcgctggcccttctgtggcctatttttatactgttcactgttcagtgtcacttgtttggtaacactcaacatcaacatgtgctaccaaattgacaccagaggacaaaaaagaatcaagatatgtacagcctgctttgtactgagccagctgccactagatgttttttgtgataatgaacacgtgaggccatgtggacgcgagagatggctccgggttccctcagacggctcacagccagctggtctgcagtgcggttttagattccgatgtgggaaccccataaaaaagaatatgcaggccaggcgtggtggctcatgcctgtaatcccagcaatttgggagcctgaggcgggtggatcacctgaggtcaggagttcgagaccagcctcgccaacatggtgaaatcctgcctctactaaaaataaaaaaaaaaaaaattagtcaggtgtggtggcggatgcctgtaatcccagctacttgggaggctgaggcaggagaatcgcttgaacctgggaggcagaggttgcagtgagcaaagatcgcaccattgcacttcagactgggcaacaagaatgagactctgtcacaaaaaaaaaaaaaaaaagtctgcaggctgcataaagaggtatgaaaatgttccagaaatcccaaatcctatccctgaggttcattttggtgagggaatgtgtgtgcattttctagggcttccctaaaaaagtatcacaagctggatggcctaaagctacagaaatttcttggggacaaatttcatgattctggaagctagaggtccaaaatcaaggtgtcagcaaggctatgctttttctgaagcctatagggaaggccttccttgtctctcctagtttctggtggtttgctggcaatgtttggcattctgtggattgcagctacataactccactctgcctccatcattaatggccttctgcctgagtgttttcatatgaccatcttcatataaggacaccagtcatatttgatgagggttccaccctactccagtatgacctcatcttcactaactacatctgcaatgaccctatatccaaataaagtcacattctgagtgtctggggattagaacttcaacagagcttgttgaagggggcacaattcaatgcataacaggatggaaactagaaacgggtatgtttttatcagtgtagaaagatttagcttaatttttcaaagtgtaataaaaaccccaggaaaactcatactccctcctaagaagagcaaaagatggagaaacccgatggttaccttcaaacaaaaggaaaggaggaataagatgaaaaggaattaatccaaagcaaagagagtggcttatatggaatgttggtgcaactttctctgacacatctgtgcactcatcagctggggcatcatctccctggggtacatttggtcactgtgtgcctcatggtaataaactccagaagcctcattgacttgctagagatgagctcatccttcttgcttgcttaatggcaaaatacaaaataagcagtcactgacatggaacgatttcaggaatgccaaaaggttctccttttccaaaatatctcttccatcttcccaatactgttactgacatcactaacacctctccacttccggttgagacacctgggccagagctcctgatgtggcaggcagtgccctaaacgttttgcataaattaactgatgcccagagcaacaaccctaagatataggtactatcataccgcatcttacagataagaaacttaggcacaaagaggtttagtagtttagatgagataaccctgatgagcagagattcgaacccagcctccatgctattaaccaggacatcatattgcctttcatacatgctcttcaaaggcaacacagtaatcgattatcacactcactcacatctgattgtcacatttttcagatctgctctcctagcagagaatgaagcctaaggtatccttgtttctcaaagtgtcctccccagaccagctgcatcaaaatgaggggatgaggtgcaaatgcctggaccctgcccttggagcactgattcataatctcaagtcccaagaatctgcattttaacaagcatccccagaaatttcttaagtatactaatgtatgggaaccactgacactaaagaaatggaataaggggaacgtacaatgttacagtaaaccaggaaaagccagaaagacatgacaacacagtgaggactctggtagccaatggtcagtcaaatgcccaggggccctggccagaagagagttaggttgctgaggagtaagagtgatgctgaatgtggaggcttgagagcagaaggaagccagccagctatatcctcttgcttggatcacacaccctttccttggtggaaatggttatttgcagagttagagaaggcatgttttacagtttggatggcaggtatggatgtagacaataaagagcaaccagagtccatgggttcagaaatccccatgtgtttctgtttgaatgagacgcttgcataaacagcacaaggagtttggggtggggttaaagagaatggtgtggtatagggagagctgaatgaggaactgagagagcaaaatcctgtgtttggttcaatcactgattacaacctccctgaggctcggtctcctaatctgtaaaatggggggaaataatacctgccttgcaggtcctcacacacagggcatgatgtgaatccactgaggcatatagcactgtgtaacatgagttattgctattccaaggcccgtaaaaggctcttgccttggaatatatctgccacaccaatgcctgcagtccattaatgacacataaaggacactggagataacgatgtcccttgttctatgcatccctcccacccatgccagaaaagaaaacacagtcacctgaagtcattctaaagagtatgcctgcctcttttcctgcacagacacatatacacagacacgcacatacacagaccatgcacatacacacacatgggaaaacatgaggaaaagtggagacaagaggcaccaaaggacaaagtcacttttgtcgcctgtcccttccccagcagggctgggcctgggctgcttctcctgcctcctccctgaagccccctcctcatcatattccagtgcgtgtccaccactttggggccaggtctacacaactgcagtgattcaggtcacgggagaaaacccaaacaagcacaaaacatgcttcaacctatattttctaaattgtttttctttaaaggtgaagacttctgagcttgaattatccccttgtcagtgggctttccatgctgtccaagtgacctaagtgataatcaacctccatttcattttgagaatggttgtggtattttagagctatggtgaataagaaaatcatttaaaataaaatgatttttatttatttattgtttttatttattttatcttaaatgaattttaaatcatttaaaataaaataatgggataaaagaggatgctaaaaataataaatatatatgtatcaaagtgtgcttgtaataccaggcaaagaattaataagagataatattatggttggtgaaatgttatgtatggctacatcctttcaatgagcatttatagttcctttaaaatatgcctactgaagaaatatttacatgctaattaacatgtgcatagtaccactaggtattatagaggataccagatgtttgtagtagacacagaccttgccctaagtcctggtcttgatgtagtcactttttagtcactacaggtgactacatttagtcactacaagtgaccttccttcaatggggaaataaaggactttacaaaagacgtagaagacaattcttaatataaaagtgatttagatcttcacaagtttgtgaagagaagcagatgagtgaaatagaacactatcaatgtaaaatattattctgaggcctctgtaatgactgggaagcaacaagagggaggtcatttcagagagagaggctctaggttccaagctggatgctcaggtcagtgactgcaggtcccctccacacccatcaccccacaccctaaccctcttcagttgctcacaaaggtagataaatacccacatttttgccctcttccatcttgaaaccctggaaacccttgcttccgccaggggaggttacttagtatctgtcaccccaagggaaccaacgtcgaagcccaagaataagagtcaatactcctaccagaggtttacatttttcccaggggtctaggtggatattcctgggaacccccgtcaacacaggcatctacagtacaatccaggcctcctgttttcagcaggggctgcaagagcactgcagccttttccccagaggtgtcagtttggcccagtaaagattgcccctgagaaaacacatgggcaattagagcaaagttcctatgttctggtaacatttaattgtgctatttctcaacctcctctgcacccacacactcacacacaacatttattccactgacttcaaaggaagctcaacgtgttaaaaatatgtgtgggaacaaagaagggagtttgaaattggtctaaactctgtataactgggtttgacacgtacattaggattttacaagtatgtatttaatctttttttaaaaaaagcgtttacatagggttcagaataatgacaataaatcaacatttctattgtccatttgtgtgttttcatagtaaataatgctcatttatccttaaccagtaatacatacttatgggcttaaattagcaaaagcctctcaaaaagtagctccactcatttatccaccagtgtccagatgccatccagcacatgaggagctcccagaaaggagcagggaacaaactagggctgtcaggagtggaggagaaagaatggcatatgcaaaaaggagctgtaattaaatccaagggaacatggcacactctagtcttttgcacgagacaaagggcaatcctggtaaaaatacagatccccaggccccaccccaaagagtctgatctgattctgaaatggggccggagaatctgcattttaacaagcaccttcaccaggtgatccttttgctgagaacccctgagaaatgagaaccctgtgctagtgctgaatggagcattatattccagagttgaagtttggtgatcagttttccagatggagctggtccttggtgcatacctgggtataaatccaagccaattcaggtatatgagctgatatttcaaccgaaacactatctatagcctaaattttttctaatattctgtttggtatgaattctagaaagttgtaaatgctatatttccttctcatctatttctggactttgtcccaagaccaaatcccagggcatctgatagacattcattgcatacatttttctgtaaacatgaaaactgaattgtctaatagaaaagggcaaggaagtagaaaataagaaatcatcatcagaagtggtttgttttggaattatattgtccagctgcataacaaatcacccccaaaattgagtcgcttagaacaacaaacattgatcctccacagtttctgtgtgttaggaatcaaagtgatttaatttaatggttctgctcagggtctctcgggggctgcaatccaggtctcaggctgggatcctttcaaggctgagctggggaaagatccatgtctaagctcactcacatggccgatggcgggattcagttcctcttaggctgtcagactgagggcctccgtgtctcagtggttttagccagagccctctctcagttcctttccacatgggcctctccacagggcaactcacaacatggcagctggtttccagtagagcaagcgagtgagagaacaagaaaggcaagcaaggtgaatgtcccagtcttttgtaacctcatctcagaagtgttaacccatcacttttgccatgttttattatttagaagcaaatcactaagtccagcccacaattagagggatggcattacacaagggaatgaacaccagcagacagggtcattgaaagccatcttagatgctgtctatcgcatctaagtgtgatttttccagatgaaaagaatatattaatttgtttcagtcttagtcgatgtgccatcccatttgtgctttgctaaaacttgtatcaatgtaaagcaaacattttctgatacaatttaggtagtgtattgtggtaatagagaccagtagtgttgaaaagatatgttgaggtcagaaattaagctcatgtttctaaaagaggagatatgtacaactactatgcaagccaacaggaaagagtgttttaagaatgctttctgctacaggtaactaaaaacctaaacagctgtggctttaaaataaaggtatatctaagtcacataagcaaaagtctaggggtgggcagctgctggcattgcttcagtagcttgataatggcaaaagcagcatctcttctatttccttggccttctaatcatgcatgtcacctcacaatcacaacataggcaacacctcatattctaagcaagatgaaaagggcaaagagtcatgccatatgcctctgtctcttttcataaggaagacaaagcttccctggaagtcccctctagcagatttcacttagatctcattggccagaactgagtcacatgcctgccttaaaccaatcactcaccaagaagactaacattatcatggcaagtctaaaccaactgtgactcatctctgaaatcaaaggattattaccattacccgaatccatcaggatcctgttggcagagaagtgggactgtaaattttgagcaggcaacaaacaagtcttctgtaaacttcttatgtgttgttttttatgtgttctatatatccagtagaatcacaatttccaataacagtctaaaaagatattttccaatagaaacagaatgtgtaagatcattacttatgaaatcccaaatgtacttaaggtttccttcttgaaaattccttattcaaaataaaatgtccagattttgaaacccagaaaagattctatattttaaaaatcctgtgcacatgtaaactgtttttcaaatattgccttcagatacattgaacagaatgaaatcttctgagatttactacatcagccaagtattatcaaaacaaacaggacagattgcttttcttgacgtctgctgcttgatttgtgttaactcatgtttctgaaattgtagtatcataagccaatgctgcacaaaggtatttcatgtcatttataaaaatctagtaatgtaaactgttaactccttataaagcatctgttgacacacaaaaatatcactgaagtgcatttatgcctttcttctttaggtctgcataatacttccctccagaaggccaagttgttccataaattacagaacagaaagttggttgtgggaggaatagctcaacctcatctgaggcatcccactctaagaaactaatggcacctacacctcttgggcattgagtttttaagcccatttttaattcttgttctgctcatattctaagtgagcacataaagtgctgctccaagcaagaccagcccttgtagaagggcaagtgcagtcagtcccctaggaaacgggactggggagtgatcgtttcaatgagagataaatcaaactgatgctaaacatgaacaatgagcccattagagattgtgagaaagaggcatcatcatccactcaacaataggcctgtgggacctcttgatagcctgaggatgtttaatttcaggtgcaggtatccagaatgtagcagctagactgatcaaggatgtgtgatgacagcaagcagtagtggaagagcccaggagagttcctaagcctgaattgcaatcctgtgctgccataaaatgggaagatatacttggtccagtcatctgacagctttggtcatcaatttctctatctcatatgtgactctattgctttaagaatccctttagctttaaatatctatgaatctgctgaagcagctgtgctttgattgatgtggatctctgaactcccttaaatacaaagaccaattatttagccgagctttgttggattcagtgcattctgaatacatgtcaaaatatacttggatttgtaaaaaatattccttcctgtttttttcaccatagatagatgtacaaaaatgtccgtgttcacaccgtggaaaggacatttctcataaactcacacagagatacctttcaagtcaatgccttagaaagcaatgagagatttaaaggagacctagagatatgaatggagtaggcagagaaggtatgtgaggagaatgatgtaacttcctagggaaaaagtatgaagcacaaggctggacatagacctgggaatcaggaaattagagttctaattgcagcttttccattgattcacttgggatcttgagaatatctgtctcattttaatcattctgggccacagtttccatatctgtcaattagagtaagagtccctggctgggtgcccaggattgtgagaacataccattcagagccataaaaatgcaatcagtaccaataatgtactagtaccagtacctaggatgcaaaacatcctagatactaggtgtcctaacttaaagtggaaacattaacaagagtaattctttgaatcatcaaactgggaatattttaggaagcatatctatctgggtgaaaactaagcaaataagacaattgtaaaggcttgtgatctcaggaatacaaaggcaaaaatgcgcagacttgaaatatgacaagttctagttttgtcacttagcatctctgtgaccttggataatttcttaacccccggcagtattctcatctgtaaaatgggaataatgacatgcacttcagtggtttgtggtgaagattattacaaatagaaattagctcttttgagccactggtggggtttaaattcccagcccttatgtgctttgcagctgttagttcctcttattacaattgtctatttaaaaacctagtcacagcccggtgcagtagctcacgtctgtaatcccaacactttgggaggccaaggcaggagaactgcttgagctcaggcgttcaacatcagcctaggcaacatagtgagaccctctcatctctacaaaaagcaaaaaattagccagtgatgcatggctgtagtcccagctattctgagggctgaagttggaggattgcttgagcccaggaggtcaaggctgcagtgggcagtgatcatgccgctgcactctagcctggatgacagagcaagaacctgtctccaaaaaaagaaaggaaggaaggaaggaaggaaggaaggaggaaagaaaagaaagaaagaaagaaagaaagaaagaaagaaagagagagagagagagagagagagagaaagaaagaaagaaagaaagaaagaaagaaagaaagaaagaaagaaagaaagaaagaaagagaaagaaagaaagaagggagggagggagggagaggagagaaagaaaaaggaaggaaggaaggaagagagagagagagagagaaagacctagtcaccaaaagcaagagattttttaaatgctactattttttgggcatttactaatcatattgctatgctctgcacccaagctaagtaatttaaataaattatctcatgtactcctctaaaactaattactgctgtgtaaatggaggtagaaagaaactaagctttatttctgcctctattgtttctttaacctgccttgcttcctttttcagttgcacctaattggctgtacttttagttttctttaaaactgccttaaatttcaaagactaaagcagcaataactaactgaatatatttatataacatgttatttttgtcatgttgctttccacccctggagacctgctctaaattcacttggacgtttgaggataaatcatgctcactagcagtttctgaaaatgcagtttcactgaaaatgcaggcatccagaaatttagtaagcaacttaaaagaaagtgtaagaatctcctatgtattcattgaaaaataatttgaatttatgcttagaaaaatagaattattattaagaaatcttacacactcatgtttttaaatatcttcactaaggaccaattgtgtatatggtgtaacactgtcctcaaagaacatgccgggagaattgttgcagttaccagagggttaaatttggcaaactcttttttattaacgtgccttttaattatgaaatagcatactcaccttagataaaatttgaaaaccatttttgtaaagtggtacaatattgaagaaagttgataactttcagaccagatttaagcctcaaatctacctctcttttacctggacaactcattagcatttctgaacctcacattttttctataaagtgagaatactatattatagagttgttgtcagttaaatgagaacagtgtctgatcacaactagtcaacaaatgttcacaactcttcccctcctaggaaaagaatctcaaggcagacctgcttcgggtctgctctgtaaagaggtaggaatcctctgctcccggtaaattgcttcctaaccttctttggtaatagactattttttaataaaggtgatggatcatttcccattatacactcaaaatgtgtgtccatttcagggcagtcatggatgaccattgcccatcttttgaccccagattaagaacacctgctgtagtattttaattctgccttcaaatcctcttacaaaacaaagacatctttaaaaaataaaattctttaggtgtcttgcagttgaatgcaggaaaaccagagccccttatttttgatagttttgggaagaatgcagtgtcagaacacaaacccataatagacaaataatttgcacagaaacttcataaaagtattgacctgatttgccatgtatttgccaccttttaaaacacacaactaaatgtttaccctgtgtctagatccaaatgggtgaagaaaaatgagtgacaatacatctacttaagctcacttacataattgtggccatgccgtttttttcacattacattattagaacattggacaataagtcaagaaacagaatgttctacaaaataaactttaaaaattggtaagcatcatgtgctttttccagaagacattttattttgttgaatcaaaggtggctctttggcactgagtagctccgtggagtcatggcagtcctcattccctaatcctgagcctgcctgagtcgctgctgtcagtcatccacttgttgggatttcaaactgcattaaatcccctcctatagctgtcactgccaagcagttgcactggctctgtcctacctttctgttggtaattctgtttttaatcctgtgcttcagtgtagtttatataaatctttacagagggataaaacttcctgtaattaattgtttgggtgaacatgtacctgggagagctattgggaaaggggccaaatttgcattccagctcctttcatccccacccttgagctaaccaagtcctgtggattcttcccttagcatctctggaaccttcttttcttttcttttttttatgaccacctttccagtcctggcccttcaaacttgagtgacagcaacagtctccctgccttgagtctctttcctccttctcccagtgtgcatacggttgtcaaactcatcttgataaactactgcatcgattgtggctacactcccctgctcccacatcttccatagaccccactgtctgtaaaataatattcagtctggcctcaacctgtctttccagcctcggtgacacaggtctattctgcctgagacacttactatgacacccttgcttgttcctggggctttgacacatttccaacgtcccattgttcttcctctccaaatcagccaattgcccaagccctgctcaaatctcccacctcatgaagccttcttgatgcctcccagcacaccatgatctaatttcctgaagtaattatgctaattgggcatttgaagaattgttaaccgattatcaactaactgccccttaacattgcatgtgtagttgtcttcaaaggcagttaaattatgtcatgttccttacattgtactgagtgcctcgtatccttatccatgtttgggggttttactttaagtcaagaaatttaatcacatccatttggttttctctagagctgtagttctcaaccttttgtgtggtagagaaacacctagagaacatgtttaaaaatatcctgggttccacccttgagagataataaggtccaaggggaacccaaatatctgtgtttcaggtcagcttattggctcatcctattataccaactcctcagaaggccaaggtgggtggattccttgatctcaggcgttcaagaccagcctgggcaatatcgtgagactccatctcttaaaaaaaaaaaaaaaaaggattagccaagtgtggtggcatgaacctgtggtcccagctacttaagaggctgaggcagacagattgcttgagcctgggaagtcgaagctgcagtgagccatgatcatgccactgcactccagcctgggtgacagagcaagaccctgtctcaaaaaaataaaaatgaaaaaaatctgtgttcccaagttccaagtgatgctgatgctgctggttgcctttaagcatctcacaaagaacgaactcataaatgctaatacagtatatgtctatggatactgaatagtgggttttttttctcttttcttctattctgtgctcatgttgtgtcacttcttccttttagattgactttgaagatgtgattgcagaaccagaagggacacacagttttgacggcatttggaaggccagcttcaccaccttcactgtgacgaaatactggttttaccgcttgctgtctgccctctttggcatcccgatggcactcatctggggcatttacttcgccattctctctttcctgcacatctgggcagttgtaccatgcattaagagcttcctgattgagattcagtgcatcagccgtgtctattccatctacgtccacaccgtctgtgacccactctttgaagctgttgggaaaatattcagcaatgtccgcatcaacttgcagaaagaaatataaatgacatttcaaggatagaagtatacctgattttttttccttttaattttcctggtgccaatttcaagttccaagttgctaatacagcaacaatttatgaattgaattatcttggttgaaaataaaaagatcactttctcagttttcataagtattatgtctcttctgagctatttcatctatttttggcagtctgaatttttaaaacccatttaaatttttttccttacctttttatttgcatgtggatcaaccatcgctttattggctgagatatgaacatattgttgaaaggtaatttgagagaaatatgaagaactgaggaggaaaaaaaaaaaaaagaaaagaaccaacaacctcaactgcctactccaaaatgttggtcattttatgttaagggaagaattccagggtatggccatggagtgtacaagtatgtgggcagattttcagcaaactcttttcccactgtttaaggagttagtggattactgccattcacttcataatccagtaggatccagtgatccttacaagttagaaaacataatcttctgccttctcatgatccaactaatgccttactcttcttgaaattttaacctatgatattttctgtgcctgaatatttgttatgtagataacaagacctcagtgccttcctgtttttcacattttccttttcaaatagggtctaactcagcaactcgctttaggtcagcagcctccctgaagaccaaaattagaatatccatgacctagttttccatgcgtgtttctgactctgagctacagagtctggtgaagctcacttctgggcttcatctggcaacatctttatccgtagtgggtatggttgacactagcccaatgaaatgaattaaagtggaccaatagggctgagctctctgtgggctggcagtcctggaagccagctttccctgcctctcatcaactgaatgaggtcagcatgtctattcagcttcgtttattttcaagaataatcacgctttcctgaatccaaactaatccatcaccggggtggtttagtggctcaacattgtgttcccatttcagctgatcagtgggcctccaaggaggggctgtaaaatggaggccattgtgtgagcctatcagagttgctgcaaacctgacccctgctcagtaaagcacttgcaaccgtctgttatgctgtgacacatggcccctccccctgccaggagctttggacctaatccaagcatccctttgcccagaaagaagatgggggaggaggcagtaataaaaagattgaagtattttgctggaataagttcaaattcttctgaactcaaactgaggaatttcacctgtaaacctgagtcgtacagaaagctgcctggtatatccaaaagctttttattcctcctgctcatattgtgattctgcctttggggacttttcttaaaccttcagttatgatttttttttcatacacttattggaactctgcttgatttttgcctcttccagtcttcctgacactttaattaccaacctgttacctactttgactttttgcatttaaaacagacactggcatggatatagttttacttttaaactgtgtacataactgaaaatgtgctatactgcatactttttaaatgtaaagatatttttatctttatatgaagaaaatcacttaggaaatggctttgtgattcaatctgtaaactgtgtattccaagacatgtctgttctacatagatgcttagtccctcatgcaaatcaattactggtccaaaagattgctgaaattttatatgcttactgatatattttacaattttttatcatgcatgtcctgtaaaggttacaagcctgcacaataaaaatgtttaacggttaaacagtcagctttattattttttcccaaaacaggtgtttatgtgtcagagtctgtgtatgtctatgtatttgtatgtaatgagcatgtgcatagtgtgtgtatgtgtttgtatgtgtttgtggggggtaatggtctcccactttaaaattattacaaagtcacttaggatatttctgctaaggtcatcaccatttatgagttgcttcagataaaagttataattaataacaaagtttttttagcaatttgcccaatgttttatatgtcatctaatttgagcccccagcaagcttgtgtgatggatattaatactcttaacttagcgaaagacacaatttgcattcggggccaatgccttcaactttgccatgccttaactgggttttaaagaggtatattgcagtctcaatttatgtttgttgcttggctaagtttaccttcaggactcctatattagggttctccagagaaacaaaaccaataggagatagttggagatagatagatagatgatagatgatagatagatagatgatagatagatagatagatagacagatgatagatagatgatagatagatgatagatacatagatagatagaat

SEQ ID NO: 5 - DNA, 102646 bp, Homo sapiens
ccgaggcgggcggatcacaaggtcaggagatcgagaacatcttggccaacatggtgaaacaccatctctactaaaaatagaaaaattagccgggcgtggtggtgcgcgcctgtagtcccagctactctggaggctgacgcaggagaatcgcgtgaacccggcaggcggaagttgcagtgagccgagatcgcgccactgcactccagcctggggaacaagagccgaaactctgccaaaaaaaagaaaaaagagtttcccgcactagccatgccagggtggagaagttccagcaagcacttctgttaaagatacttgtttcgtgaaaactatacaatgtggcgttttcattcctatctgtgattcatttcttaagttcgtggagttcctttgctccccttcccccagcaggatgtgggcaaagctgtccccctgccttcttccttcgcctgggcttctggagcctccggagctagctcccggcgcggagctccgcctacggcccgtccccggcgcggaaccccgcccacgagcccgtttccagcgtggaacaccgcccatagcccgtccccagcgcggagccccgccccgcaggctgccgggggcccaccgccgcccaggcaaggccgccctgccttgggcgcagcgctgccatggctgggggccgtggggcccccgggcgcggccgggacgagcctccggagagctacccgcaacgacaggaccacgagctacaggccctggaggccatttacggcgcggacttccaagacctgcggccggacgcttgcggaccggtaggaacgtggcttgtcaggcccgggctggcgtgccctggcctccccgggccctgggccaaagcccggacacttccagattgggccgccgctttaggatcctgcagtcttttcatcccttaggttccacccatgctcactttagtccttgcacctgcagctggtctgcagaatcccacctaggccgaattcttctacagtcctttccccatgatttccccagaggaatccccctggattcctccctcttacctggcactgcttcttattcctgcctacatcccataacataactgcctccttccaaccttgtcctttttcccctctgaaagcccttgcggatgataccacagcaattcatacgcgccccttgctactttgttctgagaacgctttttgggctctcgcacaggccttacgtcctcaatcagaattctcaagtctcatccatgcattcaaatctgcacgccacataattccctctgtactccccaggcatcctcactgtgttttccggtatggaggaactttccatacctctgcaccttcctctaagacatttagctcagaataaagcacacattcatcttagctgtagtagagagagggttctagactgagtctagagaaggagtgtccaatcttttggcttccctgggccacacacaaaatacactaacactaaggatagctgatgacctaaaagaaaaaaaaaattcgcaaaaaaacctcaatgttttaagaaagtttacgaatgcgtgttgggccacattcaaagcggcccatgggcctcgggttagaccagcttgctctagctctagaccttttaaaatggcattttgtttaaaataatattttgcctttttgtctggaaattaaggcacgttataaagtatttatactgacagttttttccccatccttgaagagttgatctaccaaactatttctgaatattatcatattatcatttaaaacatagttctaacttcatctgctttttttttttttctttttgagacagggtcttgctctgtctcccaagctggagtgcagaggcatgaccacggctcactgcagcttattctcaagcaatccttctgcctcagcctgtcaagtacctgggactacaggcacatgccactacacctggttaatttttttaattttttgtagagacagagtcttgctctgttgcccgggctggtatcaagttcctgagctcatgcaatcctctcaccttggcctctgaaagtgctgggattacaggtgtgggccaccgcgcctggcctcttcatctgcttttaactttggcatttcacaacatctgctctatctacacatccaggatttcctcaagaaataccatcttctggagctatcaggacaaaatattctctctcaaactcagggtgcttcttccttcattaaatatttgttttaggcattaggaatacagctgtgggcaaaacagacaaaaatccttgccctcagggagcttacttttctaatgcttaataatatgaagttatttttaacctgaaatggtaaaaatataaattattccccttaacatgacagagaagttggtgactggggaacttctatcttcccaaaccttgagaatcaggaagtaggcccaagaagcagccaaaataggtgtctcaaagtgtacatgggactcaacacaaagctcctaaggcttcattctgaactagtttgtttactttatacaagcttagttgtctgctcctagggctgcagaaaaatggaagagaaaaagcaacttcttttaggtagggatattgataacctcaagaatttatagctggtggctttcataacaagatggaatactagacaaaccaaagcaaaaactatagaaggcaggcagaagaatttaaatagctgtctgtggcctattgtacaccgggcaaatggcctcaacacattcataggactggcaggcaaataattgatggtctcaaggatgaatcagagtttagtcattcaacaagcacttattatcacctgctatttgccagggaaaagtgatgcaggtccaaaatcctttatccaaaactctttattgagagggagtttctctctgtcgcccgggctggagtgcggtggagcaatctcggctcactgcaacctccacctcccaggttcaagcgattcttgtgcctcagcctcctgagcagctgggattacaggtacccgcctccacacctggctaatttttgtatttttagtagagatggagtttcattatgttggccaggctggtctcgaattcctgacctcaagtcctcccgcctcgcctcccaaagtcctgggattacaggtgtgagccaccgtgcccagccttttatccaaaactcttgagacttgatgggtttcagaattcagaagtgcttctgttcacgtttatgtgtgcacattccacacattacctaataccttcctcagtgtctggggcagcatcgaaaatcaaacacaatgaaacatagaaatactcaaatttcacactgaacaaataaacactataactaacctcatgtcagttcaggctaaatttgctgccaataaattcaggttagatttttttttcaacttcttttagtggggatgtgttgtaatataaatttcagtttagtagcatatgtatatcatttataaataacattttgaggtgcatgctaaaaacttttgcatttgtaaaaagtttagacactgctagtttaaagtatctataatttatagatagttacaaattactaacttattttggctagctttccacagcagcaaaaggtctgctcatttataatttgatagcttttggaaacatccctccaaaaaacttgcttcaatccctggatcccccagtagtgtatggtggtgtttgttttcctttatcttcaacaatactatatatgttagactttttcatctttgccacataaatgaaacatatctcattttaatttttatttatttataaattatctagaacacctttgtttacaaaccattgatttttctttttctgtgaactgctcatactctggtttatttttctactctgtggtccattttcttgtttatttgtaagagctaaatatcttaagaaaactagcattttgggtcatataatgcatatatttttctcctaattatatgcatttatttacgtaatttatgtgatttaaaaaatgttgatagagtcaaaatgaccttttttttcttttatggtccctgtgggttttttttccccctctgttccaatgttactaaaaaccaaattcgtcaaagtttacttttaacttgttcatgacttcgtttttaaattttcatcaaataaagatataagtaggtttttttttttaagttcttcgttccatcaaagtacgggcctaggccacctccccgtgtgcatccctcctcctccagctaggcagctagacaaatataggcaattgaatttttcagtgtcttccactcatttgaaatgccattcctacaagcccagtgcctggtaaaacaaacaaaaaactttcaaaaattgttactgaatgaaataattctcaaatgtatttcaagtctctttttttccttgcctggaatgcttggtctcttggcttgtctcagcttcaatgctacatcctcagatagttcttctttgataaccacatttaagtatataccctcacaccccaagtcgtttgttaaggagagcaccacgtcatctcttcaacggcactctctaagcttgtacttatgtgtttattatgtttgttttcccccaccagactgaagttccatgagagctggaaccatatctgtgttctcacctccgtggactaagcacagtgcctgacacagagtcagtgcttagcaaatatgggtgatggatgtgtgatgggtgaatgagtggatgaaagacctgtggaccaaagagtgcttaacccttccccagaccacattcgcagaattatgctttatggaaggacccacacatttatcaaggattattataaagccatataagaactgatcttacaaattttgtacacatagtagaagagtacagtgtttattatatggtactccttgtaaggttcacgttataaatttctgttagaatttagtattataagtactttgcttccctaaaataatttttaggctttctcttttctgatgataccacgtttctctttttgccctgcctgccaggacattcagagaaaaaaatcaaggctcaatcccagcaacttaggatggcataataaaagagtggcttatgggaggagacagggtttggagttaaggctgggtttgaatcccagctctgtccctgtgtatctgtaggcaagaatgtaaaactccctgagcctgagcttctgtatctgtaaaatggagatgacacctgccttgcaaagttggtaaggtgcctggaccatgggagcgctcagccattgttttttctctcagactccccttgttcattatatacatataatatgaactacttcaaatccactttggaaaaagtgtatctaaattgaagaacaagggtattttgcgatttggtgaaaagtagttgattgaaaacatatgcaattctctccttgtcaagggttttcatttgttaatatctcagtattcagatctcaattcaaatctcccctgctcgcagagtccttcactgacctacctgtccagataccttctcctcgcccaccactatgtccctctactctgctttgttttctttacagcactcatcactatttgaaatcactcgtcttctagtttgtatcagctggttgggactgtgtctgtctaaatttacccctgcactcccagcttccaggagagcacccaggcataataactcagtaacatctgaacgaatggaagctgagtggaacattttggttcattccttagataacttaaaaaaggaaagtgcattttcactggcttaggttttgtttttaaatcatgcttttggaaagtatgccagattatctatttaaaatataattacaaatatttttaaagtagaacttttgatctaaaatgatcattatcttaatcattaatgattggctctacagctttgaaaaaaattttttttgtttttcctcttttaggtcaaagagccccctgaaatcaatttagttttgtaccctcaaggcctaactggtgaagaagtatatgtaaaagtggatttgagggttaaatgcccacctacctatccagatgtgtgagtacatttataaatagctttgacgtggtttcagttttctgttttgacaacatagaaacagattgaaattcgtagtattttctccttcctgctcccattccacataaaatttcatttcctctatttcaacaaaactacatcagcaatagatgttttcatgaaacctgtctcattttaagcctgttcatagttatagaattgtcactacagatacttatatttgcctagtgactattttgcttcctctgatgtgttaacttttgtttatttatttcttcataagttaggaagaggaaaatttggaagaaaacaataaaggcatggtgactgttgaaagcccttgcatagttagagtgtggctggtattagaaattcagcaagtctgtgcctcagatgacctttcactgcctagagtgagggagagtatttggatctgtcctgcctctcaatggggcactctggcgagtgtccattgtgcagggctgtgctgtgcactgcagtacgtttagcatccctggcccccacctaccaatgccacgagtgtcctccaggcattgaaacaaccaaataacctacatatttccagactccctctgaaggtgatgtcacctctggttgagaaaaactagttagagccaaagtgttagccatcagcacttaagcatgtctatttggtgtaatctttccccacccatcccacatggaaaggcaggttggcctggatggcgttaagtagtttgaaattattgtatggggaaccagtgaaggtttttgagatggaaagggacaagtaaaaggaaactctgctttacacagtgggtggtaaatttatggaatttattatcctaagaagtgatagggaggatatgaaaagacagataagtcaaaattgagctccttgaagtcagtaaccattcttggcccccaaaactgtcctgagagtattatagtaggtatactatacatactataaaaatattaattaacgaaacgttaattataaaacattaatgaaaaagataattaaaaatttatgaaaggaaattaaaagagtgcctctctaggttgtttttttttcctgacaccaaatacatgatgccttttctgataccatgtgggtgtccagtagttcagttcaattctgacactatctgtagttagcaaagaccccacagattaaggacccagttccacaagattgcctccatttctgatgctagtggcaagtcccagtacttctgaccatttatagccagtatttataactggctataaatttaggggtttccaccaccccctcctaagttgcgataattgctagaatgcatcacagaactcagtttctgtgagttacatttaccagtttgttgtaaaggatatggctctggaatagccacatggaagtattatgaagggtaaggtgtgtgggaagaggcacagagctcccataccctctccaggcctggcaccctcccagcacctccctgtgttcttcaaccaagaatctccctgaaccctgtcgtttaggggtttttatggaggtttcattatgtagagatgattgattaattaaatctttggccactggtgattgaacttgatcttcagccccctactcctccctaaagatctgggatggggctgaaatttctcaccctgtaatcaaggcttggtttttctggtgaccagtcctgatcctgaagctatccaggtactgaccagagttccctcatgagtactaactccggtatggttggaaggggtttgttatgaaaaacataagatgctcctctcacccctgttgctcaggaaattccaagggtgataggatctctgtgccaggaacaggggtcaaatatcaaatatatatttttttattataccatagcctcaagaattcaaagtgtttattcttgaaaaatcaaaataaagaaaaaggtataagtgctataatgttatataagtgctaaaatattaattatagcattatttgtgaaagcaaagatattggaagcaatctaaatgtcaaatactagagtgaggtttctccaccttggcactactgacatgtgggcagataactctttgttgtggggtccttcctgggcattgtgggatatttagtagcatccctgacctctgtctgctagatgtcgggagtacatttctccccaggttgtggcaaccaaaaaaagtctccagatgttggcagatatcccctggggccaaaatcacccctggttaagaatcatggcactagataactattcaggtaaatcttaatgtgtccacttgataaaaatattatgggatgattgcttttaacatggaaatgcttataaaagttaaaaagcaaacattataatatcagctacataaactatgaattatatagcaaggaaataaagagaacattagaattttttttgaagtttaattagcatcattgatgattttttctccattctgttaatattgctatattatgattacttattttttaaattataacaaaaatcttaatttggggtaatattcttatccttttgaatgtggtacaggaaaacattgcttttctgcagaatagtcctgggtgccactgtgagagagagactcccgggttagattctggaattctggaaatttcagccccatcccagacctttggggaggaattctagaaatttcagccccatcccagctctttggggaggaatctaacccaggattccatacatagagtcaggactgtatggtttgtttttctgttctttccctcatatagactactttctctcagatttctatctatagaaatagataatgatcatagcaccctttcatactgaagcattgagagaacgcatagataagtgcatactcaagacttcactggttaaatgccatgaattactcagaaatgcttggtaaaaagtgatgagtcatcatctcttcagtaaaattaaataactcctatttaatctgagagagttgttattggatatttattggttgggaataaaatgaaacccgagggctggttgtgtaatgtccttgagttgaaagtgttgacttagatgagctctaggcagaggtgcagagagtgtgcatgactagatgtatttatacacaagaagtgagcatttccacctggtttcgatcagaatgagtgattgggatgcagcagtgtgttgtgggaatactagagggatcaccagggctccactcatctatttattcttgttctgctttatgctagagcacacctgaatgcagagcgcttggccttgccagtgagctgtcagagctaggttaattctcattggctgcaagctagggtagagaattaccatacaaaggagcacatggttaagttactgggctagagtcagctgcagaactggaatgatttttttttttttttaaggtgaagaactcagagttagggatccaggtcaaatcgtaggaaataaatagtaattgatgttgggaaattttaatcagattgtaaagctgaaattagatacaggggtcaagcccagtaagtctaacagcccagacagaaggctttggccagcccacttcttccctgtaggacgcaggtgactccactgtcaactggagttgcagggatatggttgaagtccctttgagattaagggccttgggcccagagtgctttcagtttagcaaatattaatgcaaacaggctatactttctggagtaactcttttttttttttttttttttgccttttccagagttcctgaaatagagttaaaaaatgccaaaggtctatcaaatgaaagtgtcaatttgttaaaatctcgcctagaagaactggccaagaaacactgtggggaggtaagatttgttaaactggaattaaaagaagacagtaaacttccccattacacctcaaatccaattttgagtagcatgttttgtgttttattggttctacaaaagggaacattgtgatttttatttatttaataggattaatgaaatttgtagtctatagatggtactattgatgctgaagaatgtttctgaaaattgctaggcatggtggctcacacttgtaattccagcacttggggaggctgaggtgggaggatcacttgagcccagaagtttgagaccagcctgagcaaaatggcgagcacctatctctaaaaaaattaactgggtgtggtggtgtatgcctatagtgcaagctgctcaggaggctgaggtgggagaattgcgtgagcccaggagtttgaggttacagtgagctatgatcacaccccttcactccagcctgggccatagagcaagaccctctctcttaaaaaaaaagaaaaaaagaagaagaatttttctgaaaacagttgatgtgaacccagccatactttttgtatactttggatcttgcatcatgacttgaacctttttgttggaaaatgtgggcagacaaacaatttcggaccacctctcccctttgcatatcagaggaatttgttgttttctttctcaataattagtgacacactctactccttcagtgtctgtcatatacctgagcatttacactgagtgcagtactcattcttttttaatcttctgaacattaggatctacatatgagttctctcctgggtggcacaactctctgtggaaggcaagactaagtgtcttctggaggcagagtatgactgtgctttccttaggccagaccaattccctcgaagtataacgcttctttgccccacttttgtgtaaaatcactcagtgtttttgcctggcagcttatgtttaacgatctctttttttttttttttttgaggcggagtcttgctctgtcacccaggctagagtgcaatggcgcaatctcggctcactgcaagctccgcctcccgggttcgcgccattctcctgcctcagcctcccgagtagctgggactacaggcacccaccaccatgcccggctaattttttttgtatttttagtagagacggggtttcaccgtgttagccaggatggtctcaatctcctgacctcgtggtccacccgcctcggcctcccaaagtgctgggattacaggcgtgagccaccgcacccggccaacgatctctttatgtgaaaactaagaagaggtgccctcggcttccatgtctgtttcagacttttattagacataaccaaagataaccattcatctcatggaaagtaactggacagatttttacttgcttttcataacacaatgagtcatagtacagtccatggaatgccttttagttgtaaaaattgtgtccatttaagttgctgcttccaagaacttcagtgattgatgagatttagaaagtgagtgtagaacggcctggataaaaaactaggccttggaaatgattccaaagttctttctagtacaaggggattccagtgtctaactgaaaagtaatgtgaagttatttggaaaattcagctccagagaaacctctggtttcttggatttttgatttgtgatttaaattttttttttttttctttttgagagacgaagtctcaccatcttgcccaggctggtcccaaactcctggctcaagcaatcttccttcctcagcctcccaaagtgctaggattacaggcccgagccaccacacccagcctgatttaaatttttattttgagataattatatatttatatatacctcttacccagtttgccccgacagtaacagtttgctggaaagaagatcaaattagccaccacattcctttacgccaaagcataatctggatcaaggccctaactctcttcaattctgtgaatgctgagaagagatgagggagctgcagaagaaaagttaaaaggtagcagagattggttcatgaggtttaaggaaagaagccatcttcataacataaaagtgcaaggtgaagcagcatgtgctcatgaggaagcttcagcaagttacccggaaaaacctaagataattgatgaaggtagctacagattttcagtgtagatgaaacagtcttatatggaagaaggtgccatctagaattttcacagctagagaggagaagtcagtgtgtggcttcaaagccttatgaaaggacagactgactcgcttgttaggagctaatacagctgctgacttttcaaaagttgaggccagtgttcacttaccatgcccaaagttccaggaccgttaagaattatgctaaatctcctttgcctgtgctctataaatggaaaggcaaatcctgtatgatggcacatctgttacagcagggtttactgagtattttaagatcattgttgagacctgctgctctgaaaaaaaagattccctttaaaatattattgctcattgacagcgcacctagtcacccaagaattctgaaggagatgtacaaggagattaatgttgttttcatgcctcttaacacaacatccattctgtagcccatggatgaaggagtaattttgactttcaagtgttattatttaagaaatacattttacaagcttattgctgccatagatagtgattcatttgatctgatgtgtcttagcaaagtaaatggaaaaccttctggaaaggattcaccattccagatgccattaaatacatgattcatggaagggggtcaaaacatcaacatgaacaggagtttggaatatgattctgaccctcatggatgactttgaggggttcaagacttcactggaagaagtaactgcagaagtgatggaaatatcaagaagtctattactagaattagaagtggagcttgaagatgtgactgaattgctgcaacctcatgataaaactttaacagatgattagttgcctcttatagattaggagagaaagtggtttcttgagtggttcctgaagatgctgtgaacattgttgaaatgacaatcgagcatttaggatatttcataaactttgttttgaagcagcagcagggttggagaggattgaccccaactttgaaagaagttcaagtgtgactcaaaggctatcaaacagcattgaatgctacagagaaatcttccatgaaaggaagagtcaatcgatgcagcaacttcattgttgtcttcttttaagaaattgccgcaaccaccccagccttcaccagccaccaccttgatcagtcagcagccatcatcaagacaaaaccctctgtctgcaaaaagattatgacgtcctgaaggttcagatgatcattagcattttttagcaataaagtattttaaaattaaggtatatacattgatttctacagacataatgctatttcacacttaatagactaccatatagtgtaaacataacttttatatgcactgggaaaccaaaaactttgtgtgactcgctttattgtgacatttgctttactgaagtggtctggaactgaacctgccatgtctcagagggccgcctgtgctagcattcatctgagtcatcgtcatataatgagatttgaatgggtgttaaacatgggaaggcactgtgcaaatcactcttcttgtttatctaaaattcatttccattaagtctggagtactggaaagtctaaaatagacataattctaaagaaatttttttattttcaagtaaaatagagtataattaggtactaaagcatggcatagggattcatcttggtatggcattcactgatacttgccttttaaaactaggagtcatttaattatttgaatggaaataagtactcaaaaacagcttgttcttaagcacttccaattgcttatgaatgatttttaatctatacacagctctttgtcatgtaaaaataaacttaagtatactctattttttcaaatttgtaaagccaaagtttatttttttattaatttactcaacagatatttattgtctgtgtaccatgtgtcaagtgctattccagcactgggaaaaccacagtgagcaaaccacaccatgggctacactgggaagggaacagacagaaagcaatcaaataactgcacaaccaatcaggcagttataagtgccatgaagaaaatcagggtgagcggtctagagagtgtgacagtggagtggctgttctttacaaggcattcaggagaggcctccaagacttaagcagaggtctgagggaggccagtgagccctgtagcaccaggggagtaggaggcaagagtcagtttggaaagtagttcttttcatccagtcttagaaggtttatcaggttgatttgtacagaaaactctagtaaagtaaatagaacagcaaaagaaaaaccctccacagcttggctcctgcctcctttttggtttagaagtggtttctctttgacatgatagaaattgcctactttccccagctttcattagaagagcttttcttagaataacctgcctcttagactgtagactagtgtttctgactgtaaagtgaaatatatccagtaaatgccacagcttctggtgtaagaaaaaatgcattaacatcacccagcaagagctgtgctttctttgcatttgctccctgagagaaaggcaggataccaaatgaactaactttatatttttgggtacaatgacttctattattatttaccaccctgttaagtccctttagaaacggtttcaaacatataatgaaaataagaattttaaaattgcttcactgtaactgagaaaaaaaatctcaatgttatgttcctcatccaccaaaggatcagcactctttacctctttggggttgggtaaccagtcagggagggtctcagaaatctttgttctattgatttatcaacctaagtatgatttatgtctcctgcgggtaagggaaaggggcttcctgtgttcacataaagaatgtgtgaaagggagacctttttcttccacattctatctgtgactgcttctctaagtggaaataaaatactttctaagtatttatcagctttttattgaccagttactaacaaggagataataaggcctttaaatatttgcctctgtactcccaacaatattttcagtatgctgggtagacagaaaaagctctgatcttagcaatgagtattctctgcccaactctcattatgtggacaggttttctagttgggaagatagcttttactttcatgcagtcttaaatgttttgtcagatttatttctaaagaaatatattttattggatttactatagagaaaatgccaataagttgaataggtctataaaagaaaagtgaagctttttatttacctaggtaatgatctgtcttgataataacacaatgcaatgggccctttaaaagctttttcctgctgtgattatatcatataccgaattcagagtatgtcatatcaaaatgaataatggcattctaagtgggcctctgaccgccagtttgctttcctgttctgtagcctctcctgtttgggccttcccattatttgatcatttgtggttgatttttgtttacatgtttaggtgatgatctttgaactggcttaccacgtgcagtcatttctcagcgagcataacaagccccctcccaagtcttttcatgaagaaatgctggaaaggcgggctcaggaggagcagcagaggctgttggaggccaagcggaaagaagagcaggaggtgagatgcccttgtcgatgtctgtgtgcatggccagcctggaggattgcaaactactgtaggttttatctgtctctgcctacaaacttatctttaagttttgctcagcctttgattcaagaaaggtagacacatgtgagagtatgaaaaatatgagtgattccctcctgacacatatcagtactgtcccttagagccctcagtccaggtcttaaagaaatagaagagaaaagaagctgtttaaccaaaccacctgtggtcttttggagcttgttagggtgtacaggagttcactgcattttagaagctattttcttcttccctgtgcaagactagtatctcatgcccaaatgagtagcaaaagccagagaataatttttttattcaaacatttagatgtatatattatctttgatttaaaggattttaaaaataagacagttaatatctacgcaaacagattaaagaaaaaatacaaagattaaataccatttgtatttaaatcaaagataatatatgcatctaaatggttaccatttgtattttataaactcctgtttatatcctatgctgagattctaaagatttgtttaaattcaagtttgtttaaatacaaatagttaccatttgtatttttctttaatctgtttgcataaagatataaactcttgtcttatttttaaaatcttttaaatcaaagataatatatgcaactaaattcccttttttattttaatttatttttctaaagttttaaattttttatttgttttttctatttagcactttaatcaacttatctagaacttactttgattcaggttataaaaaaagcctaagtatatttttcttagacattttcctaacacatttattaaataataattcttgaagtgattcataatactttctttaaactatatgtttaaaaatagtttaatgtattttaatattaacagcaaacgtgcaagaagtgcacagaagacagataacattaaaaacatgtacttgcatgtaggacaactcagttagaaaagtatactgaggccagttgtggtgtcttgtgcctgcaatcccaggactttgggatgaggcaggtggatcacttgaggccaggagttcgagaccagcctggccaacatggcgaaactctgtctactaaaaatacaaaaattagccgggtgtggtggcaggcacctgtaatcccagccactcaggagtctgaggcacgagaattgctcgaacccgggaggaggaggttgcagtgagccaagatcgtgccattgcactccagcctgggcgacaactagactctgtcttcaaaaaaaaaaaaaaaaagaaaagaaaagaaaaatatagtgaatgggtgtaatctactgtatgataagaatgctacaaaccgtttagttgccatcaataaaaaatgtacttattttgatccttctatatagttcataagcttgatgatcggtgttcacacacatgtgagatacgccacctgtgaaccttgttaggacatcagcacattacccatctgacatgaaagcagaagaaagaaagagaagaatttacttgtttttaaaaaaatccaaatactggcattatccagaaaaatgtaacaggtttatctataattattagaaagttaaactgccgaaacttgttcactgaaacattttgatttgcattaatgctttacatcccccccatttatattaaaaattcacacatgaatgaaaatagaaaaacggccaatacgtgatttctgtcccctctttttccactcacagtcatatatgtaggtaccttttgaccccataggaaaaaaatatttaacattcagaagtatcaggaataataagagaattttttgcggggggagtgaaatttcccatcatagtggattctttttgtttctttgtttgtttgtttgtttttgagacagactttcgctgttgttgccccaggctggagtgcaatgatgtgacctcagctcactgcaacctctgcctcccgggttcaattgattctcctgtctcagcctcccaagtagctgggattacaggcttgagccaccacgcccgacccacagtggattcttaagcacgctctccatgtatgtgtcatgctagctggatatctttcagcacaattgttacatgtttggcatggatagatagcatacaggttggtgttttcaaaaaggccaaccagataggcctcacttgccttctgcaaagcaccaatagctgcactctggaagcacagatctgttttaaaatcctgagcaatttctctcaccagatgctggaggggagtttgcaaatcagttcagtggacttgtggtaacgtctaatttcacagaatgccacagtaccaggcctgaaatgatcggtttcttcactcctccagtagaaggtgcagtcttgcaagcggctttctgtagccagtggcttcaacccaggaggcagaggttgcagtgagccaagagctttaccacctgtggatttgtgggcagtctcctttgtattatacaagccatggtatagagacctccttacttacccccttctccttctgctggagttataggtggtgcagcggcggctgcaaacgcaattctcaagtgcatcttaactgcttacctatactacgttctatttgtcaatgatctgttcaactcatctgttttttcttgaatctctaccacactctttgaattattgtatctttataatgctttaatatctgacaagtcaatcctacccctccccatcccttcatcttccattgtttttgtttctcagccattctcacccatttattcttacagaagatgtacagaattactttcccatagtcaaaacaaaacaaacatcctgggatttttattgattttaaaaaatcttacatatttatttaggaagaattgatatcttcacagtatttagacttcccattcaggattgtttctttttccatccagggctgtttgtttttgttttctgttttttggattttttttcttttttttttttttgagacagcatcgtgctctgtcgcccaggctggagtgcagtggcgcaatcttagctcaccgcagctcaagggatcctcccgcctaagctgcctgagtagctgggactatagccgtacaccactgcacctgcctaattttaaaatttttttgtagagacaagatctccctatgttgccaggctggtcttcaactcctgggctcaaccaatcctctggcctcaacctctcaaagtgttaggattacaggcatgagccaccgtgcccagcaccatttgtatatctatttttattttttgttgaggctttctaattttcttcctacagatattactatttcttaaagttacttttagtgttttgttcttaggttcttatgcttgtctcttttttcattttattttgtttctgcttcattttgtttatcctgtgcttacattaacactgtctttttgtaggtgccattgattttgttacttattttctatttaagtgtgtagcctagttattgttgggagtttgtagttcttttttattatttttattttattttaatttcttgagacagagtcttgctctgttgcccagactggagtacagtggtatgatactggcttactacaacctccatttctcaggttcaagcaattctcctgcctcagcctcccgagtagctgggattacaggcacccaccaccatgcctggctaatttttggacttttagtagagacgggcttttgccacattggccaggctggtctcaaactcctgaccttgtgatccatccaccttggcctcccaaagtgctgggattacaggcatgagctaccgcaccctgccgggagtctgtagtttattattgtccttgttgttaggaaggctaatttttattagaagatagtgactatttagctaacaattttgttttgacatactgctatagctacctataagtttggggtgtgtttttacacattgtattattgctgttatggtttttggtgaatctcttaatagttttgataattataatctggaattttagaggaataatgcaaaatagagatcaaaataccacttttaacattgagaaagctgattagaaaatacaggtgattgaagaatggcaggtaggtatggtacttgggccatggctacctcaggtgcaggcactgaggcttgctcagcccaccttcaccaagctgaccgggacccccatggcagagagcaggcacaagtgcttgttctctgcagataggcagatatcaaacaggaggagctaagacaagtgtcggaagaagtgagaagccaacagtgttgctgtagtggaaatctcctgcacatagaaacatgaagaatggggagtaaatgcccctccccacacacgctcaaacctgtttaaatgggaatgcctattgcgtaagaactctgataaaactgatagaactgcagtttgtactaagatgctgtgttttcagatctcttaggaagagagggtttgaattattgaaagttaaaagatttttctgtagttccataatttatatgttgtatgggtttcagagattggcatttgatgatggtttgatttatttcagcaacgtgaaatcctgcatgagattcagagaaggaaagaagagataaaagaagagaaaaaaaggaaagaaatggctaagcaggtaccctatcaactccaccataataatttacattttgcaaaacaaagtgtttttatttccactgatgacatctgtgttactatcagtaatacagcttaaaataaagcactaaaaataaataaatattcactgtgtatttcagactccctaaataggtggcaaaatttagagttttatgttgtcagtagatgatttagacttacataattactgtaatttatcaaatgagggagggaagagattgcgtctttaataattaacctggactaaaattgttcttttttttgagacagagtctcattctgtcgcccaggctggagtgcagtggtatgatctcagcccactgtaacctccacctcccaggttcaagcaattctcatgcctcagcctcccgagtatctgggattacaggcgtatgccactacgcctggctaatttttgtattttttagtagagatggggttttgccatgttggccaggctggtcctcaacttctggcctcaagtgatccacccaccttggcctcccaaagtgttgggattacaggcgtgagccactgcacctggcctagaattcttaatacttggaaaataaaatgatttgttgatactgaagagggaatagaaaccatatggatctgcctgaaatttcatccagtgatgaaaaagagtaattcaacagagcagatttaaaaggcagtggtgaaaaaggatagagtgctttttcctttatttttcctgagtctagctcaagcaaaaaaccagtcagacgtgtttggagaaattcagagaaaattttactcattctcttttacataaattagagcattaaacttaagggacatgatgtggtagcaggaagaggcactgaagcacaagcaagcttctcctggtttaaagcttcagctttcctgctgcctcactttgtgaccttggcaaggtgacattctctgtgactctctttacttgtcccttaaaatgggactgataatgcctttctttctgtcttgtataattacctccacagataagtgtactgccctatgtgaaactaaacctgcgtaaaaatgtaagatgagatccctgtttccaccagtgctcctgtcttgctcctgacctgccttcctgtcagccactctctgccctctctttgattctcccttcttctgttcatctcctgttactcttctccctaactttttacactattgcaagattctaagcattttcatttataaaatttacattttcttgaaaccataacctggacttcagttcttgagccagtacatatttaggcattaacatttttttaattttattttttaattgaccaataatagttgtatatattcatggagtatatagtgaagttttgatacatataatgtatagtgatcggatcagggtaattagcacatccgtcactgcaaatatttagcatttctttgtgttggaaacattcaatatcctccttctagctattttaaacgattaaaagttaagttcaattttatttcacttgtaaacattcagcttaaaatttgcattctatactgaattaataattatgtaccatgattttcttccatgtatgacttacatctaaagtaagttttacttttcttgttctaggaacgtttggaaattgctagtttgtcaaaccaagatcatacctctaagaaggacccaggaggacacagaacggctgccattctacatggaggctctcctgactttgtaggaaatggtaaacatcgggcaaactcctcaggaaggtctaggtaagtccctgggatttctgatctgggagaatgacagatgtagaaggattttactacattgaagatgtagtgaaatttgatggaaatttcaggcgatagtcttaataacttttttcaaaccttatatatcttaatatattagcaatatattaggtgtatttttagcaatatgaaactaaattgcgtttaacactttccaagtatctatcatgaatctagttttgttgctcattccctttttttttttttttttttgagacggtgtctcgctctgtcacccaggctgcagtgcaatggcacgggctcagctcactgcaacctctgccttctgggttcaagcgattctcctgcctcagcctcccaagtagctgggactacaggcatgtgccaccacacctggctaatttttgtatgtttagtagagttggggtttcactgtgttggccaggctggtctcgaactcctgacctcgtgatccacccgcctcggcctcccaaaatgctgggattacaggcatgagccaccacacccagcctcattcccctttataacagcctataacacatcacaaacttgccttagtacgatttaacatttataaacttaaattcagtaagtgattttaaaatttttcttccatttgaatcatcatcatccagtgtttcagtctacaatgccttaggtcccaccacagttgtaaggagtgcctgaaaatgagcacaggtgagacatctgttacatgagagtaggaaccccagttggctgccaggggtcccctccctaatactgaggtgggctcctgggctgttccctgtcaccactggtcacttaaaagatactacttgttcttctatatctttttcactgaagaattccaactttgctctctatttgctgtggccccctgtacaccagaaaggaattttggtgaagaaaccatttatgagtggggtgggttattaaatagtgtagggacttcaaccttcattgtatgtttaaattatctcttgtgagactctaagcacaacttaaaaccaccactttgcttccatgaaaagaaacattttaggcaccaaactgaagatttatataaacttctgtatagtttgtttattagaaggagccattttagttctttccctaattatctactactaaaaaaacagttcagaaatcattttgacactaatgtttacctactattaggtttaactaaatttttaaaaaaatactgtttctggtaaccattcctttttaagattataactccttcccaatttaaattatttttgaatctgggcttctaataagcaacagagtttgaagttgtcagagaatttcactaggaaatatctaacaaatttttgttgtattagaacctttgaattaaatcaatgatataaataagtcttttcagatatatggaagatgattgttttaagtttaaacatttctatttttgtggctaactataaacagtgaatccaaggttaggcttgtttttgagatcagagatagcacgctgggcacggtggctcatgtgtgtgaccccaacactttgggatgccaaggctgaaggatcacttgagcccaggagttcaagaccagcctgggcaacaaactccttcccatctcagagcctctgccgacccctctgcctggactactcaacctctggcattttgcttgctgagcccctccttctcattcagttctcccctcaaatgcaaccttctcagggatgccttcctgagcccccctctaccctatttccctgctttgtcccttgctctccaattctctgctttattttttacataacacttagcactagctgaaattgttattcacttgtttactttggaatgtgaggtctgtgagagcaaagccctcatctgtgttttcctcaaagcctgaaatcgtgcctggaagacacatggtaggtgcctggtcaacatctgatgcagggagggagccagggagggaagatgacacagggaaagtgggacactgtgtttctggtgtttgtagggtctacagcctctttaaccagggcagttttgcttctcttgatctgtggggtatgtaaaaaaccagtgaggttttatttaacaaaagatgttcacgctgaaaagaagagaaagagagaaaagagaaccactcactattctagtggaaagaacgtaaaggcctgatactcaaaggcttttcactgatgagtcttggcttttgttgaagaactttattttctgtgcttcaagtcttcttttcccaccttgaaggattcactttttagaatattaaggtaaaaatcaaaaaacataaaattagctattttaatgtgtacagttcagcgtgaggctgtatttgtgaagtgcagacatagtccccccaacccactgccttgtttctgggatgttgctcctcataagtgggcaatatgaattttgtagaagaagcaaaactaaaaaaccaaaaaacctctataaaatagctcatggtagaaaattaccttcacatattcagacttgctgtctttgcagattaccgtagtgtagcccagaatctagaatatatcacctatttatatctaccatcaacaagattaggttatctagtttgttttccctattctaaagccaggtatggtaactgctggctcctcacccttacagagaagagatcattaagggtataagacatgggattctctctgctctcctcaaaaaacttggggaaccattaaagtataaaggtgtaggggagagaggatccttgatacgtctctccagacatggtcctctgttgttcagtttctgtggttggttccatggaggcatagactggtttacctcaaattaaacaatatcaggaattcttactaatgttgtctctacaaagtggctctgtgtttcaaattaagggacctagaactagcattttctgtggcatcttggtgagttagacaggaaggtgagactatccctgcccctgtgtctcagataagatcctctttctccctcctgccccaacatctacacattgatcataatggtagagcaatcttttggatggtagcccaattctctagtccccacttgaaaaattgtcatctctcttcttgccacttggctttttaaaaaaaaaaagattatccttttttcttttttcaggtatcaagctcctagctgcctaatttagtcatctaaaattgtattatgtttctctgttctttttaaagacctagattaatactatttggtaattttatttgaaacacccttcatataggttgggaactgccacagatacttggcaaaactgataacatgggtgatatttttaatattatgataatattgcaaacctcatgaacatccatactctagaatagatcatgatgatgagaccagagtcatagcttctgaacaccatttgtttgcactgtttctgctggagtacagaagtcgttttacttatgaatggattcaaatccaaaaggttgttccaagcccagttcttgatgggtcccaggtagacagtataagcatccaatatatatgaatctttttggcgaaaacaatagatatggatgacattgcatttgtctctttattccttcttttcaaactctgtgatttactttttatccttcagaattgtttctgctacaacctgtgccatgcagcatgtaccacatttgtcgttttcttactttcacttttatctctacttttctttcaatcctagttattccttaatcttacagccatcaacactcattgtgtttgtacttatcagtcataatagggtgattcacattctaaaactccttaaaaccaagcatttacacattgtaaacttaagaacagaaagatggcctagactaaaatgaccattagcaccatctgctgaggaggccagagctgatgtagagatgcttctgcatagtttatgttactaagtctagcatgtaattttaaatctttgcttttatccttttctccataaatctcagtgtgtccctagttgcacacataactttagaagtagaaatttgaacagaactacaatgtatttgctgttttctgatgtttagaatatgtggacatgggccaggtgtggtggctcatgcctgtaatcccagcactttgggaggccaaggcgggcagatcacgaggtcaggagatcgagaccagcctggctaacacggtgaaaccctgtctctactaaaaatacaaaaaaattagctaggcatggtggcgggggcctatagtcccagctactcaggaggctgaggcaggagaatggtgtgaacccgggaggcggagcttgcagtgagccaagatcgcgccactgcactccagcctgggcgacagagcgagactccatctcaaaaaaaaaaaaaaaaaaaagaatatgtggacatatgtgtggtgtaagatatgagtatcataatacataatcttgtcaccagtgtaggaggggtttgaggaaagagaggatgtgtaggattggaagcagaaagaccagataataacagagtattgcatatgtccaggagaaagttggagatgaactaaacagggcaggggagatagagaggagaaggtggtacttgaagaccaattagatgcagatgtaggagcccaaggagactcacaggtttctcacctgtgagacagaatggatgactatgcccctaaccaaaattaaagagtcaaggggaaaaatcaggtttagagcgagtggagggagtggcagttttattgacgttgcaatggtgtgagggataaatagtgcagaagtggagacaggaagtgcagtaatgtgactatgaggaacaggatggggcgggtggtgcagggttgagggaggggaatgtatggatcagagagatttataggctggtgggagggaacccagagagaggggctgactgaacatctgggagaaagggactaactaatagactaagatcccagaggagacctttgtaggggatgggactgaggacaggggtagccatccttcctcaaagtcacccacaaagaaagaatagtgccaatgccaagtaactttataggaggaacaatagaaattgtggactgtattcctcttgcctcgtgttctcagtgaaagtaaaagtcaaaatcatgctgagaatgagagggtgatctctctagagatctgtccatgcacgtcatcgaagtgtttctgataagtgttcaatcctgaccatcaagagctctctcccttgcctcttccctgcaaccctctcccctaatttattgtttttgcattatgatctagtttcttagctcttgctcccaccagaaaaaaagtagaaaaaaagaaagagaggagaggctgggttttaagtgttttggagaagtcatggaagggaatgatgggaatatctaccaaagacaagcaagagaaggaatgtgcactcaatggctggaggcccagttggaaaccaggaatttgtggcagctccaaccccctctgttttgcagctttctccagatgtgcatgtgcgtgggaatgaagcaatatgggatacctgtggaattgatctaaatcactgctgaccagtagaactttttatgataatggaaatgatctgtatctgtgctgtccaatatagtagccactagccatgtatggctattgagtacttaaatgtggctactgcacatgagctgaattttcagttttattttaatagccacagcattgggcagcacagacctcgagttaggggtttgtggttttcatgtggagaagatgacaatgggaagtgggggaagtgaatggctttcccattagcaccgcctactcaattcccagtagaaacagatgttagactgcgagtgggctaataaacagtaataaacgggagaaaatggaggggcattcttgcctatgttaatctataacattcctatgttaatcttaaagaaaaaaatgaaaaatgattgttcaaatgtattgttcaaatttatttttaaggcgagaacgtcagtattctgtatgtaatagtgaagattctcctggctcttgtgaaattctgtatttcaatatggggagtcctgatcagctcatggtgcacaaagggaaatgtattggtgagtaaactagcaaaatctattcatattattgtaatggcaaaagttaatcacaaaggaatgggatggattagacactgtgtcattcagaccagtgcagtccaaggaagaccatcaagctggtagtcattctggctcccatccttaatgactggaatgagaaatcactcaggtttcctctaatgtaagatggaaataaaaacctgtgtttttgtctgggcaccgtggctatgcctataatcccaatactttggggggccgaggtggaaggattgcttgagtccaggagttcaaagctgcagtgagctgtgatcatgccactgcactccagtgtgagtgacagaatgagaccctgtctcaataaaataaaataaaatttaaaaacctgtgctcttggaatattattaacataacgatcattttaaatctgtcatcattataattatccaagcttattgaaacaaaaaaatgattaaaatattatcagtcagtagaattttacatcatatacagctaatgctgatcaaatgtatgtaacaaagtgaattctaatgcctatgatcttttttgttgttgagacagggtgttgctccatcactaggctggagtggtacagtggcacaatcatagctcactgtaacctcaaactcctgggctcactcaatattctcccctcagcctcctgaatagctaggactacagtaatgtctgtggtctttattgaccagatctcattttcttaagtggatatccatccatttggcattttcctgcttgacatattatacctgaccaagaagaccaccttattttctatatgccttatttagaagttttgtctactcgtggctgtttggcgtgaagctggttcagcaaatcagaatttgaattgctcatactaaagtcaagtttttggtatttcttcctttaccctaaatgtatgtcatctttacccagccttacagataaaaccagtaattggtatagaaaccatttgtacatagtgaatttggcaattaactttcattttcaatcccatgcatatttttgccagaagtaacaggtagccaaattatgtgaaatgagtttgctttcttttgggatcttttccccttcctctttaaggagatacaaataagcaaaagagttgccaggaagcagccagcaggtggagggagaagaaaccaaacttctcaataatctatgagctaaatacttaaccttggcagacacacagcagcctggacagtaaaggatcctgcacatagacagagctgccatatttagacaaaggaatcattgggcaggttcaagacattggtagtggtggttggctttagacctgagactgtccttgactcagacatttcagattcatgaagtgacaacataaaactacttctaataacctggggaaatcaagaaggcaaattaattcaattcttattaccttaacttagtctcttattctcactggtactcattagacagattcaccatagttaatacccttattaggaggcacattttcagttggagaatttttaataaaattaccaagtaaattattcattttgttttctcacagtgggtctgattttttaaaatatgccctaattgtctatgaaatgtttttataaaagattaactactaatttttttattttcaatgaagtatttttataaaaaacaatatttgtttttcattttaaagttgttagaactagacagaggagagaacttacttatagatatgactatagcactatagagactgtctgcataaatgatcattgtgggcatatagggtttcagttagagttcttttgataatgtattttctcttagcctcgtctcagtatattcttttgtcccttttattattcccatcatgaaaaactgacaagaagagtctggcaatactaaaattataattttttaaaccccagcaactatgaaatgcctgcctagtcccaattagggaaacaaatattgcaaaacactgtactgcataacacacaaatttaattaggctttatgtaaataacgtcttactccatcccataaacatttaatgccatgtgtttctagtagactgcttagatcccacatttctcaggttgcttcgtttggttgacaaatttttaaacagcaggattttttccccttaggcaaagactgtcaggagttatttatgactaacagatcattttaattaaaatctctaaattatcagcattcccatgaaataaaaactgcttgtcagataaaaagtcaaagtgagctagttcagccatatttttccaaagtatttttgctgagacatctttatcatgtatatgcaggttacttcacctttgattattcaaatagaaaagataattagcaatgtctctttaaaaatttgttttcattatgaagatagtatagcatcatggaaaactattatttatataagagaaaaaggcagattactatatatcggggttatcagctgggggccattttgtagcctgcaggacatttgatgatgtctgcacacatttttgatggctaacattggggtcggggtgctattggcatctagtgggtagataccaggattgctgctaaaatcctacagtgcacaaaacagctgcctacaacaaagattacctggtccaaaatgtcatagtgtcaaggtgttatatatatgctatgatatggtaaattatggggtaaaggagaatagagggaactaaaagaaaaataaaacaagtggtgatttttttctccttttccaattttttagaattttctattatggttttaatgaaaatagagatttttataagaaaatttttggtgttacagaaatttagctctccctgtgtaagtgagaaccatatgactatcactaaataaatgtgtctcattttctagcttcaaatctaaactgtcatctcttgttctttccttccaaagcattgaccagtttgtatttactgagcatattcaaattttgcacttagaaagtcattgatgtattcagattttcaaattactgttttactgtgcacactaatctataatgatctcgatggcttgttctctattttcatattctttctgtcattttagttggtatttagctgtatgagtgtacaccagtagacacagtcagcaaaggtagactcgttatgaaaataacattgtgcataatggctagtagcataaaacactggcctcttttgttttttgagacagagtcttgctcttgtcgcccaggctggagtgcaatggtgcgttgtaggctcactgcaacctccgcctcccaggttcaagcgattctcctgcctcagcctcccaagtagctgagactccaagtgcccgccaccaaacctggctaatttttttgtatttttagtagcgacggggtttcaccatgttgtccaggctggtctcgaactcctgacctcaggtgatccatctgccttggccttccaaaatgctgggattacaggcgtgagccaccacgcctggccaaacattggtctctttatttgcctgatactaagatctcattgtagattcttgccccttataaaaaattattttaggactcaggtatattgctaaatatcaaaaattgtttacaaaaggacattattacataaagtcctattttccatagttagcgcatggtatccattgttgaactaaagaatgtgtattaccccctcccttccttcccccaagagaaaacataccagtgggatttaattacactttctgtttaatgtgcaggcagtgatgaacaacttggaaaattagtctacaatgctttggaaacagccactggtggctttgtcttgttgtatgagtgggtccttcagtggcagaaaaaaatgggtccattccttaccagtcaagaaaaagagaagattgataagtgcaaaaagcaggtaagcatccaaggtggctgactgagcaaaaggcctaatctcaggctttaggagatgacagaacaaaatagccctgcatttgtttgccctgcagagatggtccagagcagtatgagaactgtttgaccagggaggacagtgaaggaccagtacctctttgccccttgcctctggtttcagaactttcacaacatgatcaaagcacttccagctgccttcttaacctcctttcttagcccttagtatggcattaacagtcatctttccaactgggactaaatactagttcataattgggtttttttgcaattcttcttttccctactcttgaaatattgcttcagggctgggtgtagtgactcatacctgtaatcccagcactttgggaggccaaggtaggaggactacttgagcccaggaggttgagaccagtctgggcaacatggtgaaaccctgtctctacaaaaaatttaaaaatctgtgggcatggtggcacatacttgtggtcccagctgcttgggaggctgaggtgggataattgcttgagcccgggaggctgaggtgggataattgcttgagcccaggaggttgaggctgcagtgagctgtgttcatgccactgaactgcaacctgggtgatagagcaagaccctgtctccaaaaaaaaaaaaagaaaagaaaaatactgcttcaaaactgaattttgggggaccggaggatttttaagttaatttataaattatgatttataaccaagcataaggagaacattcagtattgcatattgcagtgttacataataacaaggtttacaaaaacgtagataaagcatggtgttcagaaatgtgtgtgtatttaagtatagaaagaaaactgaaagtaaatgtgccaaaatcttgagttatcactgggtggtgaccacatagataacatgtgggtattttctatcaaactaattttttaaatgttgacaatgatctttattaaatcagaaaagattttttttttctgtcttcaaccttaactcctctttgccatgtgaggttctgaggattaggatgtggccattattctgctgctcaaatcatatactatatttttaaaaacccaaatacaaagctaatcagaaaaggttatttttaaattaaagtttgttttttctagtggctatacctcaaaagaattttattttaaaaactgttcactaattttgtagtatatgcatagtaggttttgagattagagaagttgagaattagctaaattttttccatctttatgaactattagattgaccatatggtttggggaggattcagtttagggcatatttgttctcctctcatttgaaagtatattttctatcaaatacttcacttttggttttggttttgtttttttatgcccccatcttgtatgatcaaatacttcacttttgaaatgaaacccaagttaatgttgactggcccaatattctttttttttttttttaacttatcagattcaaggaacagaaacagaattcaactcactggtaaaattgagccatccaaatgtagtacgctaccttgcaatgaatctcaaagagcaagacgactccatcgtggtggacattttagtggagcacattagtggggtctctcttgctgcacacctgagccactcaggccccatccctgtgcatcagcttcgcaggtacacagctcagctcctgtcaggccttgattatctgcacagcaattctgtggtgcataaggtcctgagtgcatctaatgtcttggtggatgcagaaggcaccgtcaagattacggactatagcatttctaagcgcctcgcagacatttgcaaggaggatgtgtttgagcaaacccgagttcgttttagtgacaatgctctgccttataaaacggggaagaaaggagatgtttggcgtcttggccttctgctgctgtccctcagccaaggacaggaatgtggagagtaccctgtgaccatccctagtgacttaccagctgactttcaagattttctaaagaagtgagtatcactgagattctctctaatagcactttactcctgtacttttgattgtgctggagtgtgccagacatctaagtgatgtggaagctgagaagtgaggaacaggacttcattctttgctctcccaatcctgtcctagtctcatatgttctgttttctcatgtaggttggtgattctcttaactaccacattctctgaaattcacttggaattcacacttgattttcaaactccttttgggggactgatgggatactcttggaagtcaatagagatggttatggtgagaaatgccctaggtattccaaatactgacctttgctctggttcctaaagggtcaaagacgaggctccttattcaaaaacagctttgggagtgagattctgccccttgtgcttcttaaccattcttcattggctgtctcattcatttaagttgtagaatgcaaataacttccttagtctagccagaggagtttcaatacctgtaaatcacaggtgcatgtttaattacaaagccaagttttatccaatttgggagaacccttcttgagatgtttcctcaggcctaagatgtttgtccaggtccttcacttaagtgttttctaatttcgtcctgcctctgttttcagtccaagccagagctaagttctgtcagtttctgttaaatgggagataagatcccttcagtctggatttttccagatgctcctctggtccagctatcctgcaggagttgacctgggctggtttcttccctttctgacactctttgttttttaccttctttttcccaatcatttgcttttattcacttcttccatttgcaacatttcttttacccttcacatttctttccctattccacctatcgcagtagccagttggcctggtttacattgttatgctctgtcactgatggtcttaccattacagatgtgaaagtagctgcacctgtgtttgagattgtttttgtgtaaagtgaatatgatatatatatatatatatacacacacatacatacagttgtggaaaggggccaagtttgattctttatgttggtttctcgccttgaagtatatgaaaatattaagatttctaaagaaatcttttatggtatctttttaatgcaatggagctttaaacatatttatttaaatgcaccctaacaatgaggttggccaaaatgacaaatatgatgatagaatcacagatggaaagtttcatttccatcttcaaaatgtcacctttagtgttctgccttcttcattgatgaagagtaatttagtcaaggttagcaatagcatcatgtgttgttaaaaacagtactgggaggtttaagtagaagtacctttcctttcccgtttagtagcaaaatgaatgggctcggtaggtaaaactttcctagttctcttcttaaatagctgtatgctctgtcagttttaaacttgagatcagcacaatttcttattcttttttttttttttttttttttgagatggagtctggctgtgtcgcccaggctggagtgcagtggtacgatctcagcttcctgcaagctccgcctcccaggttcacgccattctcctgcctcagcctcctgagtagctgggtctacaggcgcccgctactacacccggctaatgttttgtatttttagtagagacagggtttcaccatgttagccaggatggtctcaatctcctgacctcgtgatccgcccacctcggcctcccaaagtgctgggattacaggcgtgagccatagcgcatggccttcttattcttttaacaagatttttctttagactattttgtatacttctctccctggagtggtttgatagactgtgcttggttaaggagctgccaagaactgtttttatgaactttgctgtccagccctggttaacaaaagaaaaatgccattcacaaagaatgaaaacagcaaccttccatttgtagttatatttttacatattagtgaacaccctttggagcaagattttgtttcaaatcagcctctgtgatgggtaagactctggagtcaaaacatctgggttcaggtctcacctctatgtcctactggctgagtgaattaaccccctgccctgcgtttcctcctctgtgaaactgggataatagcactgcctacctcatgaggtggttgtgaggattaaattagttaacagccataaagtgcctggcacttggcccagactgagtcagtgctggttttcatcaccatcctcagtagtgagaactatgaagaaatgtgggtgttgccaggcattttatccctttttgttcaaagctgaaccttttctatatacggctaccctgttgccaaaattattgattcagagaagttcatttttaaagtgagatcttggtggctataaatctcttaaaaatactgtgcattctaggtaggctgtaacatttttctgatccagatttactttcaagtcaataacatttatgtcacagttgagttacagttgataacgcaattcagaaacccaacagggcatatatagggatgctcattgcagcattttgtgaaaatgtgaaaaattggaaataatctcaacagtaggagaatgtgtaaataaattctggtaggtccacgcctatacagaagtttaaaaaaaatctttaagtactggcttagaaagagctccaagacacatggtggaatgaaaaaagcaagctgaagaataatgtatataagatgatattgcttaaaaaaatcaaaaaacaatactattttgtttggatggttgtatgtttatgtgtataaatgcatagaaaaatctctacaatgagacaccctaagtggaagaaagaattggaaggggaggttggtcaaaggctttatcattatcagtaatgttttaatatttgcaaggagaaggtatatatgttttaatgatataattaaaaagtaattttaaatttaaaggaaaatacggtatcttatacaaatggttttattagaatttttttgcctgttcaagctatgaaattaggagtaccttgctttttactgctgcaacataaaaaaaagttaccatttatgatagttgctgtcaccactttgtatgtatagatttttaagtccagaactcacaacgacagttgattcttttaagtatattgttttaattataggtcaagtgctaccaagtcgtactacttgggccgttgtaatgaaagtagcttggcatggtggttcatgcctgtaatcccagcattgcaggaggcctaggtgagagtatctcttgagtccaggagttcaagacctgcctgggcaacatagtaagacctcatctctacttttttaagtattccagcacagcagggcgtgatacctcacacctgtaatcccagcactttgggaggctgaggcaggcagatcacttgaggtcaggagttcaagaccagcctggccaacatggcaaaaccccatatctactaaaaagacaaaaattagccatgcatggtgacactcacctgtaatcccagctacttgagagcctgaagcaggagaatcgcttgaacctgggaggtagaggttgcaggttgcagtgagccaagatagtgccactgcactccagcctgggcaagagagcaagacttcgtctcataataaaataaaataaaatgaaaataaataaacaaaacattccagcatggtggtacacgcctgtagtcccagttactcaggaggctgaggcaagaggatgctttgagtctaggagttcgaggctgccatgagtgatgatcgcaacactgctttccagcttgggtgacagagcaaaaccttatctcaaaaaaaaaaattaaaattaaaaaaaaaggccagcttaaatcagttacagtttaactacttagactttaacttagactttagcttgcattgaaatcatttggagctcttgttaaagcacagatcactgtccaaacctccagagatgctgatttactaggtcaggggtatagtagaatttgtatttctaacattttttaggggatactgatgctactggccagggaccccactttgagaagccctgggttaaaggtatggcttgtttttcttcattaaaaaacaaaacaagaattgtctattacaccattaaacagtaagttaatgggttcaaggaatgaagattaaaagaaagtatatgaggccgggcacggtggctcacgcctgtaatcccagcactttgggaggccgagacaggcagattgtttgagctcaggagttggagaccagcctgggcagtgtggtgaaaccctatctctacaaaaaatataaaaattagccaggcctggtggtgcctgcctgtagtcccagctactgagatgggaggattgcttgagcccgggaggcagaagttggaatgagctgagatcacaccactgcactgcagcctgggcgatacggcaagaccctatttcaaaaaaaaaaaaaaagcataaaccaatttttaaaaaaagtatgcaatagaatatgggactttaaaaaagccttccctaaatgtttccaacttgcttcatcctgtaatgagcaggcttcatctaaagctcgtcatactgagccactctgctgcaccaactctctgatttgctttgtctttcgaaagctttatttataaccggttcctgcaaaggcttagtttggcatgacaaggcattaaactgttcatcgaggtgaaaatttatagcctacttgtgctaccttagacttttaaaaaattgttccatgagggtaagtcttctcatctagagatgcctttttttgattcgcctcttgtacccagcctgtcgcatagcatgtaaatcctgcaggaatgtttattaatttaaattcacctatgagagtacattctggtctttgagtaacatgaattctataatgtgtatctttaaaaaataaacccatagttaatgccttggattaactagtttagcactgattgtttgtgatgctaagattcttccttccctctcaccgagatgtgtgtgcttggatgacaaggaaagatggagtccccagcagttgttgaaacacagctttataaatccccagccaaaaatgcctctagtggaacaaagtcctgaaggtgagtctgttacctttctttatttggtaacctgtttgacattaaattattttgaaagtatacataaaccaaaaactggaaggggctgcatgtgttattttatgtcttttattctgaactaaatccattagtttgatgtgtgccatgtgcatgggactgttttgccaccctgatttttctagtctctattgatggaatgaatgtccattgctgtagtctcttgtagtgtttagtcacccatagtgccatgtaactagatttttcctgctgcacctgagattaaggaacctcggtagagattgggatggatcatgagacctgagttttggttctagctctatagttaagtcacttattctatataatcccccacctgtaaacttgggctaattatatatttctgcctactttaaggagggcaaggtgaggaaaagttttaaaaggccactcaggtaagaggtaatttttcaaactactggttggagctcttcttccagggcttccatcattgttggctatgtagctcttcctaaatttccaatgcctcatgtgcctcttactccctgttttatctcagattctgaaggacaagattatgttgagactgttattcctagcaaccggctacccagtgctgccttctttagtgagacacagagacagttttcccgatacttcattgagtttgaagaattacaacttcttggtaaaggagcttttggagctgtcatcaaggtgtggtacagagtcattcccagtcccctttagagctccttctctgttccatttccacaaagactcatggactttacttttattttgggagtggggagggaagtgaatatggctgttggatactatgctcatcctcaccttcctggagttaaaggttttatttaagttacgctggacacagttgagaattgtcccactcctctttccttgcttcatgtggagcattaacatgaaacacacatggttataacagcacttcaagtggaatcaagacctccacagaaagaacatttttgtgtgctttggttcagaaagaacattgttctttttttctcctgtttgctgttagagttgctgtagataaaaaggttctaaggttagaagagagatggacttcaaactgggagatggccccagcaggtctcgatggcttttattttccagctattattgggacaggaaagtagcgatgtattattaaggtacactgttgttgggtcttcctttcttcgttctagtctatttgggtgacttttattattatctgccccttgtagaaagaggtttcagctgtttttatataatagaagtatttctttgtaaattaggagacccagattattgtattaagtccatatacagtacatgtcatctttcacatatgaaggtaacccaccatcaactgagtatattgtctgttaaggattctgagagtatcattaggaagcattactgttactgtagaaaaacttttacactaaaaaaggaattaaattagttttcctgtggtaaaagacagacaagcaagacagatgtcctgatcagaaagatcataattatgtctaagaggaggggatgattgaagcgtatactgtccctttaacacaatatcattttgatcaaatcctttaacttcattctattttaaattcttgaacgtagaatagtaacaaatttcatctctttacaagtacttaataatgataggcaagctcatataacaaaaacatctgagtaacttaagcccccacggtttccagtagtttctccctgtgagaatccacagccctcacctcctacctctgtgcttctgtgtcagagtagggcagcctgcccagtgatctggcattcattagcagttggacccattactgtttctgcaccttttcacttcagtaaatgaattcctaggggtttccagtatagcaagctttactcccaacccagttcgtatatgatgtgtactgagacaggagatcgaaaggcaatgccaagatccccacctcccgccctacactgtcctcttccctattaatgtggcagtaaaagaacacagggctatcattttttggagcacctgccatatttcagattgtgtgccaggtgatttacaaaccttgtctttaaatctcaggacattcttacgagatgggtatgatcctcattccctagatgagggaactgaagctcagagaaggttatgtcctttgcctgagataagggagataaaaccagcattcagacccacctctgttgtactacaaagtgtgtgttcttgtcactatttccatacaaaaaaagataatctgaaactcaattttgtagtacttccttcttattcccaggacttcacttagacttttattagtttaattgaaacttgtgagccaaacaagagaatgatattctgttttgtgttttgtaatcaactaatttctcctgccacccatggccacatggcatttgcttttctagagtatatcatcacctcagttgacctgcacggatgtgactacaaggtttcagtgaataagactctgtaaaagttacttcagtcaccccaattacatagtgaaactgcctggcataaggatgcctctatgtaggatgggaggacttgcctttgcaacgttttcttgctttcttattattttactgtgttgttaattgtattgttctggtttcagtatacatcatcttaggtatataacaaaatcaatgggcagtgattgtgttaatagcaattgctgttattgactaagctaagcacctttctctgtgaggccttgatacaagtgctttacagtcaccatttggggtagtggaaatggtataaatgccattttaaagataagaaaattgagtctcaaggaaattaagtaattttcccaagttcacacggctttagaaatcaaggaattaacctttgtgttcaggtctgttaatatttttggtgtttaatttgtttttagtgactttaagtgtaaaaaaaaatcagagagaaactaaaatcatctgaaactttacactgactttagaaaataatttttaatcttaaaatcaagacacttagaaatttagatagcagatacattggaaaagcagggaggtaactgtcagtaaaattaattattaaaatggagattatgttttccccagggtctcccagcaagctaaatatatctagagtcgggtgggctgttttctgaattttgtggcagtcaaagctttcttcagtttaagaatttcaggcatgtggttcttgactgtagctgtgggactcatttagaacttcacgctttccttgggaggggatggggtgcggtgcaaatgcctgtttgtgcaaggctccgagcggctgaccttcccctggctgtgccgcaggtgcagaacaagttggacggctgctgctacgcagtgaagcgcatccccatcaacccggccagccggcagttccgcaggatcaagggcgaagtgacactgctgtcacggctgcaccatgagaacattgtgcgctactacaacgcctggatcgagcggcacgagcggccggcgggaccggggacgccgcccccggactccgggcccctggccaaggatgaccgagctgcacgcgggcagccggcgagcgacacagacggcctggacagcgtagaggccgccgcgccgccacccatcctcagcagctcggtggagtggagcacttcgggcgagcgctcggccagtgcccgtttccccgccaccggcccgggctccagcgatgacgaggacgacgacgaggacgagcacggtggcgtcttctcccagtccttcctgtaagcgcacggcgcggaccagctgcctctgatgcgccccctagtttcctttctttatttttttttcctttttcctttcatttccttccttccttctttccttcttttctttctttccttttttgagatagggtcttgctctgtcacccaggctggaggtcagtggcgcgtccttggctgcaacatccgcctcccgggccagcgaatgccccccaacattaatccccaccaagtccaagccagggaaaaggggattcatttagaaatccagacgtgttgaccatgtttaaaaacaaaaacaaaaacaaaacaaaaccaccacttttagagagtaaccaaatgcaatctaaaggagcggtccccagcgtttttaggcaccagggactggtttcatagaagacaatttttccacagacgggtgttagggaaatagtttcgggatgaaactgttccaccttacatcatcaggcattagagtctcataatgactgctgaaaaagcgcacaacctggatccctcgtgtgcacagttcacaatagtgtttgcgctcctatgagaatctaatgcggctgctgatctgacaggaggtggagctcaggccttaatgcttgctcacctccggctgtgcggccctaacaggcagtggacctgtacctgtccatggcctggaggtttgggacccctaatctaaaggattttttttcccgctattttcaaaagatctccaaaatccaagccatggaaaaaggaaaattcaatacctcatcttatacattgaatagaatttctcataggacattcctttggataagggcttgcaaccctgtgaaacatttaagaactaatttggagtcttgatacagtgccaactgcagcccccaaaggtaccaaaccaataattatgatcctaaattttatgcttctcagaatccaccctggatgtttactttcatgattttgttttattttatccaagtggatacagtttatgattactcttcactattaaattttttgaggaaacttaatctggctaatttttattaaatcaagggttctgtgttttgcataatagcaagtacaaatcagcacagtgtagagtatacattgatgcctgtgggctcatggtgtgatgtctgtagcctcttgtgctttctagtatttaaaaatgtccatgtttataatgataatagggatttctgttcctttagtatttctgtttccctttttcaggcctgcttcagattctgaaagtgatattatctttgacaatgaagatgagaacagtaaaagtcagaatcaggtatatatatgaatagaaattatatcattttattcgtgatataattgacgtctgatgtcataaaccttaggtaaagtattaaggctttaatctgatattcagatatagaaaccataaattttaaaagatgattattcatttaaaatatattctacctgtgtttatttatagaccttctttatttatccacatagtaaaacatacctccttttagaagagaggagtcagttgagacactgcatttttgtatgtgatgaaaacagttttctaagggtttgggaaactttatatggttggggataagaattgaatgcaaattaatgaactagatttgcatttatggagttacctcatcatggagttaccttggtctgtcccacgtcaattaatcttgattccttattttcatagaccatcctctagaacagtgttttcacactgtgtatcgtgatcctataatgcaggggtgtccaagcttttgtcttcccttggctacactggtagaagaattgtcttgggccacacataaaatatactaacactaatgatagctgataagctaaacaaacaaaaaaatcacaaaaaatctcataatttttttttgagattgtgctgtttttttagttgtgttttcaatggagaaatacatcatctgttgacaaaatagcttttgaaaaatacgagtacagatactataaaacaaagcaaacttcagtcgtgagacactacatacatcatgtgaaagcaacagtctgatctccaggttgtgaaaactataattaaaaagtcactacacagaaaagatccaagtttccaggttggcaaaacttcggtgcagttacatgaaacgtttaacaaactgatttgttttccccaatgtgtaaacaaaatgacaagactaagtctgtgcctggtaatttcaatgtaactctgaagctacacaaaacacacagacaccttatacacttcacctgttagtatgaccatcttttttgttaggtggtgggaggaagggcaaggtgactgtgtaaagcaaagatgtgggaagtagaaatattatgtactagacgttataaaatcatggtgaaaagaaagctttgattaatgcgtagcctaagggggaaaagactacactccaacttcagaaaattaatttagaaggataggggaagagattaagtaattgcagtttaacatgaaaaatgcacatgtgatagaatggagcacaatggaagattcataaaacatgctcatcagaaaaatctgttaagtttactttgtccagattaagaaagagtaagtttatcaacatctggcatccctcatactttgtaaagatagatcttctgctgcttaattatgagaaattattttattcaaagaggggagcttgtcaagtgcttgctagaaattatttttaaaatgcttctacatgtaaaatgtactgacaaattttggtaaaccatttaaaaataagaattagttttgaaatcttggagaaaatgtctttttgcccacatttaaaactgaaaatcaattttactatagacaggagttctgtggagtatacaaaattcctcttagaaatcaaatggccatcccagatagatatcaagtttcacaggcattacttttagtcagtctcaagtttcagccacgggaccaaaatttagtgttctgtaccatgttggtttcacatcacggcttaagaaaatactgacattttgtttcttatgaaataagtcctatcttgtgcatacaagcaaaaagaaaaaggaagaaaagaggggaggggaaggcgcaagaagctcttttttgtttgttttgaagacaacagattgaaggcaaaagaatacagagctttcataagctcaaagaaaaatatttgctggctagtcgctgatttgtatgcactataaaacattccataaataaaactgatatatcatttcttaatcatgaccccatcaaaacgaagttatttcctaactattctttcaacgtcaatgtaccctagagttgacatttcatttttaagggttgcagctacctcataggaactgaaatagacgtacgcttaccctttctctgaagtataacagtgcacaatggtatccaatttgaagactaatggtaaagaaaattcttcagaaaaaactgaaaatccatcaagctgaaaatctataattagttctactttctaataaaaagtacataaaagtacatcatcagaataaataattcttatgccagtttgtattgcaaattttccaaacaatgcatcaaacataaacccaatccagatgtcaattgtgaatacaaatagagcttgaggttgtttttattaaaggcagtaatttttgaaatagttaatgcaactgttgctaacacaataataggactcctggcctcacatactaacctggacttctgatcaagtgctaattagcccagtaagggaggtcaccaaaaactactagggcagtcagttgtggctgtggggaattattctactattggggactgaatgcaacaactttattactattattattttaagaggcagggtctccatctgtcacccatgctggagtgcagtggtgcaatcctagctcactgcagcctagaactcctgggctcaaatgatcctcctgcctcagcctcccaaagtgctgccattataggtgtgagccaccatgcctagcctgcaatgactttattaccaggaataaaaatataattaccagcagttacaagggttcattcatagtaaagaaaagtctaagtgtagactcttaaataagcagttcaatgtatttgaaggagatctgagtattagccagtgtgtttttctataagtactttccttgtcaatgaaatcactactaataaacatttattagttataaatttaaaccaggaataatagcataaataaactatgttggctgcagtggctcacacctgtaatcccagcactttgggatgccaaggcaggtggatcacctgaggtcaagagtgagaccagcctggccaacatggtgaaaccccatctctactaaaaatacaaaaattagccaggcatggtggcgggcacctgtaatcccagctactcaggaggctgaggcaggagaattgcttgaactcaggaggcagaggttacagtgagcccagatcacgtcattgcactccagcctgggtgacaagagcgaaactctgtctcaaaaaaaaaaaaagtctgaactactgctaaagccaaagttaatgtttggtgttagcatttgttatgcacataattattacaggggcaccaaatcctggttttgctcagttaagggcagcatccatgggcatcctaattgatgggtagaaacctccaagagattaacagtgtaatacagataatccccagcatccataaatgattcaggagtagaacctgattgttaccagagcagagcttttttttttttctttgataaaggaaaaagttcaaaaaaattcttcctcagaaaaaaattataaatcagaaatggtcaaatactaactaatactttttctgcacttggtgttataagtattcaaatacatctattgagggaaaaagacttttttaagaaaagtatcatgtatgagaaagaaaattagctgttggggacaaacagagtaatggtatgggaagtgtcctagagggtcattcactgtaagtggcagctgagggcatgttcttcaagcatgtacctctgagggcagtgtgccctttgataatgtggtcactttttttttttttttttttgagacagagtctcactcatcgcccaggctggagtgcagtggcacgatctcggctcactgcaagctccgcctcctgggttcacgccattctcctgcctcagcctcccgagtagctgggactacaggtgcccaccaccatgcccggctaattttttgtatttttagtagagacagggtttcaccgtgttagccaggatggtctcgatctcctgacctcgtgatccgcccgcctcggcctcccaaagtgctgggattacaggcgtgagccatcgtgcccagccatcacttttaaattgttttacctaaaggtggatttctagtcttctgtttctgaactaagcctaccaccaaaaaatatggaattccagtaaaactgaacccttcaaatattagcctgtatgcattctgaccttcttagccatagatggttatcagcggtaagaaagaattgacttgacaaggagtttttctgtttaatacctgcctattttctgtttactgtatcattgttctgtgtagcaacagacctgtaaaccacacagaggatactggaaatagcacattttcaataattctgtgagcttcttttttttcctttttcttttcttttctttttttaattacacttaagttctgggatacatgtgcagaacatgcagttttgttacatagtacacatgtgccatggtggttgctgcacccattaacttgtcatctacattaggtatttctcctaaagctatccctcccctagctccccaccccctaacaggcaagccccaatgtgtgatgttcccctccttgtgcccatatgttctcattgttcaactcccacttacaagtgaaaacatgcagtgtttggttttctgttcctgtgttagtgagaataatagtttctagcttcatccatgtccctgcaaaggacatgaacttgttctttttttatggctgcatagtattctatagtgtatatgtgccacattttctttatccagtctatcattgatggacatttgggttgattccaagtcttcactattgtgaatagtgccgcaataaacatacgtgtgcatgtgtctttatagcagaatgatttataatcctttgggtatatacccagtaatgggatggctgggtcaaatggtatttctagttctagatccttgaggaattgccacactgtcttccacaatggttgaactaatttacactcccaccagtagtgtgaaagcattcctatttctccacatcctccccagcatctgttgtttcctgactttttaatgatcaccattctaactggagtgagatagtatctcattgtggttttgatttgcatttctctaatgaagaccagtgacgatgagctttttttcatgtgtttgttggctgcataaatgtcttcttttgaaaagtgtctgttcatatcttttgcccactttttgatggagttgtttttttcttgtaaatttgtttaagttccttatagattctggatattagccttttttttttttgagactgagttttgctcttgttgcccagggtagagtgcaatagcacgatctcagctcaccacaacctgcacctcctgggttcaagtgattctcctgcctcagcctcccaagtagctgggatcacaggcatgcgccaccatgcccagctaattttgtatttttggtagagaaggggtttctccttgttggtcaggctcgtctcatacgcccgacctcaggtgaaccgactgcctcggccttccacattgctgggattacaggcatgagccaccgcgcccggcctggatattagccctttgtcagatggacagattgcaaaaattttctcccattctgtaggttgcctgttcactctaatgatagtttcttttgctgtgcagaggctctttagtttaattagatcccatttgtcaattttggcttttattgccattgcttttggtgttttagtcatgaagtcttttcccatgcctgtgtcctgaatggtattgcctaggttttcttctaggattttcatggttttaggtcttacatttaagtctttaatccatcttgagttaatttttgtataaggtgtaaggaagggatttggtttcagctttctgcatatggctagccagttttcccaacaccatttattaaatagggaatcctttccccattgcttgtttttgtcaggtttgtcaaagatcagatggttgcagatgtgtggcattatttctgaggcctctgttctgttccattggtctatatttctgttttagtaccagtaccaagctgttttggttactgtagccttgtagtatagtttgaagtcaggtagcatgatgcctccagttttattctttttgcttaggattgtcttggctatacgggctcttttttggtcccatataaaatttaaagtagcttttcctaattctgtgaagaaagtcaatggtagtttgatgggagtagcattgaatctataaattactttgggcagtgtggccattttcacagtattgtttcttcctatccatgagcatggaatgtttttccatttgtttgtgtcctcttttatttcattgagcagtggtttgtagttctccttgaagaggtccttcacatcccttgtaagttgtattcctagatattttattctctttacagcaattgtgaatgggaattcactcatgatttggctctctgtttgtctattattggtgtataggaatgtttgtgatttttgcacattgattttgtatcctgagactttgctgaagttgcttatcagcttaaggagtttggggctgagacaatggggttttctaaatatacaattaagtcatctgcaagcagagataatttgacttcctctctttctattttaataccctttatttctttctcttgcctgattgccctggccagaacttccaacactatgttgaataggagtggtgagagagggcatccttgtcttgtgccgattttcaaagggaatgcttccagcttttgcccattccatatgatactggctgtaggtttgtcataaatagctcttattattttgagatacgttccatcaatacctagtttattgagtgtttttagcatgaaggggtgttgaattttatcaaaggccttttctgcatctattgagataatcatatggtttttgtcattggttctgtttatgtgatggattatgtttattcatttctgtatattgaaccagccttgcatcccagggatgaagctgacttggtcgtggtggataagctttttaatgtgctgctggattcagtttgccagtattttattgaggatttttgcatcgatgttcatcagggacattggcctgaaattttctttttttgttgtgtctctgacaggttttggtatcaggatgatgctggactcataaaaaagggaggagtccctctttttctattgcttggaatagttttaaaaggaatggtaccagcttttctaactaccatcagagaataccataaacacctctacacaaataaactagaaaatctagaagaaatgtgtaaattcctggacacatataccctcccaagactaaaccaggaagaagttgaatccctgaatagaccaataacaagttctgaaattgaggcagtaattaatagcctaccaacccaaaaaagaccaggattcacagccaaatgctgtgagcttctaaggatagtggttatgttctgctcactgacttctccctaaggcaactgggtggccctgtgttgggggtgggcacaaatacttaatgatggtgatgattttgcttaattttggcctccattttgagttattgtgtgttcgtcttgggttaggatgaagattgcaatgaaaagaatggctgccatgaaagtgagccatcagtgacgactgaggctgtgcactacctatacatccaggtgaggtcgtggtgtgtagttaggtgacacagcaacacccagtagtggcgggtgggcctgtttcagggtattagaacaagataatggacagaggagggcttattgccactaccaaagattaattggccgagaggattaccatatggaggcccttttccccagccttgaactcatgctttcctgccacatatcaggagcagccacagggcagctctgggctcaggctgtgtaagttcacatcctggatccacctgttaggactgcatgaactcgggcaaggttcttcagcatcttgtgcctcagtttccccatctataaattacataatagtagttcttatagacttgtaaagaataaataacatgtgaagtacttagaaccatatctgagttccataagtgctagactgcatgagcacagaaactctactttgcctaaccacctgaatctggacaagtaagatatgatgtgcacacatgcctgtacatgcaaaagtaacaccaaggtgactttaggcaaagtggcttgaccaggaacctctggagaccagtgcacaggcaagccagttccaatggggcatgactgagaagtctgagctttggcctgcctacctgccagagcaacaacatcctaaacaggggtgagtgggctcttccagtagaggagtggccataaaacaagttggccgggcacggtggcttacgcctgcaatcccagcactttgggaggccgaggcgggtggatcacctgaggtcaggagtttgagaccagtctggctaacacagtgaaaccccgttactactaaaaatacaaaaaattagccaggcatggtggtgtgctcctgtaatcccagctactcaggaggctgaggcaggagaatcacttgaacccaggaagcggaggttgcagtgagccgagattgcatcattgcactccagcttgggcaacaagagtgaaactctatctaaaaaacaaacaacaacaacaacaacaaaaacaaagaagtctttcctctgccccaagggaacaggactgtgggtcactgttagtatttcagtcataactgcaagcaggcagatctttaaatgtgagatacagaactgggcagaaaaaggaaccctcgacaagttacagcattttgaatgagatgaattaggtatttgctttcctggagttggagctggttttaggtattccgtaacataaatatctttgaggtaccacttacacagataataaagcattggtcccccaaaccactgtttatcctctattatattccattaccttctacacaattagaatgagatagaagtacacaaaggaggtgcatccgacatgcatcaggatcacggtgtgggcatcagagggggccttgtgaggcccggagggtgaaccagagtttactgacaattattccgaaggtgatagaacaaagtctggtcttcctctctttaaaaacaataaaacctttcttcgtgagaaatctcaactctggcactagttgaagcatataggctagtttcataaatcaaatggtgcatgttgatttaagatttaagtcatgttgcactgttttctgatatgtgaatacactcaagaaggggtgagacagagcccctgtgtcactgtcccaagaagacttgaatgttttaatatttataatatttttctctaaacttgaaggtcatttgtgtttaatgtaagaaaagctaatgatataattaggttaactaaccctccttgtaaatttgggtttggaagcgatcttgtaaaacaataaataaaattttacaacattctcagttttttatgttaattgtgataagtattttaaacaagtcatatttttaaatgagcaataatataaaaaattaaaaatggttatgttggagtgccaagagtatgcatatttacccccaaggtattttttaatactgttggtttctttttcgtgtagaaaaccaagtctttcccctaaccgtttaaaacccatggtacacgttttaaaatggaggattatgtaaattgcagttatactccttcacttaaaactgttgtgtaatcaaattctcctggtttgtctgtatatagatggagtactgtgagaagagcactttacgagacaccattgaccagggactgtatcgagacaccgtcagactctggaggctttttcgagagattctggatggattagcttatatccatgagaaagtaaactttacaacatttcatatctgaagacttatgtttacataaatttatgactgcataaaaatatcaaatgtaagattggagaaaaactgaaatagagggaaagctatgggtatattgacataatctatttttgtaggaaatagaacaaagtgtcaaagacaataaagtattacaaagtatcagagtataacattaaaaaatgttaagaaaactttaaaggttaggacagggatcagcaaactgtggcccacaggtcaaatctaacccactgcctgttcttgtatggcctgtgagctaataatgactcctatatttttaaatggttgtaaaaaattagaagaacatttcgtgacacataaaaattacatgaaattcaaatgtcagtgctcccaaggttattggaacatagctatgctcattggtttacatattgcctatggctgttttttttccataccagcagatttgagtagttgcaacagggactgtaaagcctaaagtattcactctctggccctttacagaaaaaatttgttaacctctgggagaggagaaagtatttgaacatgtagggaatatgaggatgattccttgagtgctttagaattagggccaggtgcggtggctcatgcctgtaatcccagcactttgggaggtcaagatgggcggatcacttgaggtcaggagttcaagaccagactggtcaacatggtgaaaccccatctctactaaaaatacaaacattagctgagtgtcgtggtgcacacttgtaatcccagctacttgggaggctgaggcaggagaatcacttgaacctgggaggtggaggttgcagtgagctgagattgtaccactgcgctccagcctaggtgacagtaagagacttcatctgaaaaaagagaaaaaaagaattaagcaaggatgtgattaatacctgccaagttacttgattctaactgaattagtgccacccttcctaggaacacggggaaaccagaaggtcatctagcaagaagagaaatgagactttctgagtaacttagcttgtcgcatgtctaaaatgtcattttaaagctagaaattgccattataatataaatgctaatgggcctagcttcaggatgaaacactgcttacatttttaaaatgagattgtctaatgcattaaccaatataaattcattatttttttcctttgcctcaaatttctttaaccttaaaatgtttgtactgtaccgtatttatactgagaagcaagggctgtaatttacacatgtgtagtttgtaaatgatttggtagaagcagaatttgcaaggttagaaatgaaaatgaattctaatgagggccatttaagctgtattactgtgattttatcctgggatgctagaacaatgccccctgtgctctattccactccatccaatttgctcagtattggctaaccatttgctggcatctaacactgtgccatacctggaaatacaaggaggcacaagtgtgtgtcccgtgcttgagagggacttcttgctcttagagggacccagaatttaccttcatgtaatggtaaaagagatcattattttctctattataatgcatgaaacaatacagattatgagccattaggaaaatgagaaagcagtctcatgtaacaagtaattgttgcacacctactgtgtgtgctggggatgccaagttgaactgttagaattactgtggaaggctcatgaatgagttggcaattgcaaatgttggtatagtgcaaatgcatggaaaaaagcgagtatcctacgaaggggagagggtacaaagaaaggaatagaagaaggaataaaaatggtgtgtctccctgaccagaggagaggttttgtaatgcagcagaggtaagggtaacttggtgaacccagtggaaggggccttggatgccacagggaactatttagaattcacctggtcaggataccaccaggtagaactaggaaacagtaaagaggtcataggacagtcaggacatattgcagaggccagacagcctggaccagggtggtctgtgggagaagacctcatacgattttcatcgctaggttggccttttaaattaggaagtaggtataactttatgcatggaaaaccattgtttgtttcttcactctctttcaacagggaatgattcaccgggatttgaagcctgtcaacatttttttggattctgatgaccatgtgaaaataggtgattttggtttggcgacagaccatctagccttttctgtaagtattttaaaaattagactgtacctaaaaacagactcagatgtcttgataatcctggaagtgttagcggatagaatagtgcgttcacagaactatgccgtctaatcctcaggagattatacaaacctgaaggggtatgctgcaaatgatcttgtaggctttgcaattgtgagtatatttttttgagtgcattccacttgagggacacaaaattattggcttgggaacaatattgtggtcaaaggtgtacagtactttatgaaatcatttggtattttggtctaccatgcctggcactgggctagatgctttatacctcagaggcttttgttggtttggggaaatgaggctcaaaaacgtaaaacaccaggagaccatacagttgtaaggctcaagaaaggctggataacgacagtggcatttcagatgtccttaaatggtggttgggagtccaacaggtggaggttgagggcagggcctggtggccccagggtgggaattccagagagagcacagcataagcagaggccccggggtaagcagacttggctgtcggaagaccagcatactgtctgactggtcgaaactgtgaggtgcaggggagagtaagaggatgcggggcagttgaggagtcactggaaggttgggcagtcttgtaggtggtaggctttgaatgccagaggaggaattttgcttcacattataaacccaagttattaagcaccaagatctgtgggaaatgcagttaattccaagggtgatcaggaaaggaaaataggatttgagttaatggtgagaataaccactggggccaagttagaaggtgagactaggagtggaaagggaggagagggaaggcagacagtacggacagggtcccgatcatgctccccatggagtatatgggagagtgctgagaccaaggacgggccagatggtggggatcttgatccccaaactaaagaatttaacttgatatctggaaggctgtagcatagtgagatagataagagctcaggctctggaatctcactgacctggactagaatcctatctctgccactgctttgtagcatgatattggacaattaattaacttctcaatacctcatttgtaaagtgtgcctaatactagtgcctagctgaaaaagttatcaggaagataaataagaatgcaggtaaagcacctagaacagtgcccagcactaagaatgttgaagccggtgttactgatggtgatgcttgtaatgggaagcacctattacaagtgcagacataacaatagtgacttagggtattgacaacactgttgcacatagtggagcaaggtgaggctacctggggggcattagccatgagcgagggtggaacatatttgctgagcagcctctaggaaagaagaataaaaattgatgcagagaaagtaacagcagtgggtaagttgaaagatgaatttgttgtttttaatataatcttactcttcttagaaaacagattctgtttttggcatttgcaacatgaaaataaattggtttctctaagtgtttgcatatttctgtcctaaagaaagagttgtacagtgattgcccccctccctcttgatttcattgggttttctgagagccttgcattagtgggttaactaaactagaaaaaaaattaaaactcaaagcgttattatattattttgatttccatgtaatatttcctcagtcttcatttagaaacagacaagccattctcatggaataatatcatgttttaattggatatttggcttacttatatttttaggctgacagcaaacaagacgatcagacaggagacttgattaagtcagacccttcaggtaaacccagaagactatatatttcatccatgtgttaaagaccccagaatttcttaacctgaaacctgttttttacttgtaaaggttttattctacggcagattttaattgctccttaagttaacaaaattatggaaacgttttaatctttttttccttttcaatttatgaattattctttgaactttaagaaattagagcttcagtgagtagaataattggctcccaggggtagacagttttattttgtctaacctccattggtaatgtgaggttacctcatgacctgatccatctggggtcttatctggcactgtccctcctcttcaatagcaaagacatccttgtgtagaaccgaatgtgtggccatacgtgacttatggttattcatttggtacaatgcatgctctgcttcctgtgagtggcatagacagttaacagatcatgcctcacttttaagaaacctttttttgtttttagtttgtgtcttctgtaagtgctattattgggacgttttccctctgttttcctccacacaggtcacttaactgggatggttggcactgctctctatgtaagcccagaggtccaaggaagcaccaaatctgcatacaaccaggtaagaggttttgtggggaaaaggaatctcaaaattaaggtaataggacatctagatcacagcatttgggatttagtcccggctaaaatagtcaagacatccactcattcacactccaggaaggactcatggtcctaaggatagtgactgaaactggcactgctgctgccaggagcttacagtccatccatccatccatccatccatccatccatccatccatccattcatccatccatccatccatccatccatccacccacccatccacccatccatccacccacccatccatccacctgtccatccacccgtccatccacccatccatccactcgtccatccgtccgtccgtccatccatccatccatccagccatccatccatccatccatccaaagaatgtgcaaaccaacccctatcttgggcaaggtgccaggaacagatgtggctccagccctcagggagcttgtccactggtggatgaaacagacaacaaataagtaaaaaataaaagatatagccacaaattgtggtgagggctaggaagaaaagaaatggaactgagtgacaaagagaacagattgaccagggaagatctcttgagaggatggcatttaggataaaggatgagaaaggacaagccacacagatttgggggctgacacatgccagggagggagatggtaaggagcagaggaaactgcacacataaagagaaagccctgagtgagagagacagcttggcacatttaagacagccaaaaggaaggctagtgtggccacagtgtggcaagcaacaggggacagaggcatgaagttaagctggaaaagaaggcagggaaagatcacacagagccaggttggcctggataaggagtgtgcatttaatttgaagtacacagggagccagtgaagaatcttgagcaagagagttcactctggctgctgcgaggaggctctgcaggaagtcctggtaaggcggttggcagctggaactggactgcaagcagtagaaatggagagaagtgtgctgaattaggaagggaattgagagattttcccaatggaagggatgttggatgagaattaggaagggatttgagagattttcccaacggaaggaatgttggatgagaatgaggaagggaaagagtccagggctcaggtttctttctggaacacctgggtgaagagtatttgactgaagtgaggaaacctaaggacagacataagaggaaggaggagaagatgacagaaaaattcagtttgaggcatgttagtttgaaatatctgatgagaaatccaattagagatttcgagtagattgttagagacccaacacttgagttcagaggaaaggtgagaatcagaaggataaatttgaaatcagcacacagataggatttaaagctatgagactggatgagatcacttagggcaagagtgtaaagctaaactttaaaaacacattaggtgccaggcatggtggttcatgcctataatcccaggactttgggaggctgaagcaggaggattgcctgagctcaggagttcaaaaccagcctgggtaacatagcgagacctcatccctactaaacatcaaaaaaattagccagtcctggtggcacacgtctgtagtcccagctcctcaggaggctgaggtgggaggactgcttgaggccaggagattggggctgcagtgagctgtgatcatgccagtgcactccagcctgggcaacggagcaagaccctgtctgaatcaattatatatgtgtaaaataaaatacattaggaaagcaatttgcatcaaagcaaatgctcaggcttgcagtggagattcaagcctgggttttggttctgacagggagcattggacaacaacataaagttgaaacagacatctaagtacctggtgagggtgagggttagggtatcaggagatggactgcacacactgtgagtgtgggcagacacctttagtgtcattattattattattattattttgagatggagtcttgctcttttcgcccaggctggagcacagcggtgggccatcagctcactgcaacctccgcctcccaggttcaagcaattctcctgcctcagactcccgagtagctgggattacagacgcctgccaccatgcctggctaatttttgtatttttagtagagacagggtttcaccatgttggccaggctggtctcaaactcctgacctcagatgatccacttgcctcagcctcccaaagtgctgggattacaggcatgagccactgcacctggccgtatatacatatttttttaaaaaaccaaagtgggggcatcttagacatcagtaataaatatccctgagtggtgggatcatgagattgctattttattcttggtgcttttgttctatgttttctatagccaacacgtataggaaatgccacagtgaatgtttttaagatgtcggaggtcaccagtgacaatccaagagtctcgccgccccctctttgagtccaaatgtattcaagagtattgcttgaaaatgttttccattgtcctgaaagcggctctacaccctgcacctctgtgcccctgaccatgtgcagtcttttcctcggcagctgtgtcatgctcggtttcctcagatgcactcccttcccaacgccatcttctccttcgtggcaccctacttagattttctctgcactgacttgcctttttgcttcttttttctttttattgtagatactttttttgtttttgtcaattatttaatagttatcttgattatttatatccttctagttttttgactttagtgtttttttctgtagctttttatttttatttattttttatttttttcctagcttatggaggtatgattgatgaaacttgtctatatttagggtgtacaatgtgatgttttgatatatgtttacattgtgaaatgattaccacagcgaagctgaccgacatacccatcacctcacctggtttccattttttgtgtatggtaagaacgcttgagagctactttcttagcaaacctcaagaatacaatgcgttattattaattatagtcaccatgccgtgctttagatctccagaatgtattcattttataactgaaaatgcgtgccctttgaccagcacctccccttgacccccagtccccagcccctggtagccatcattctgttctctgttactgtgggtttgacttttatttagattctacataccagtgagatcatgtagtatttgcctttctgtgtctagcttatttcacctaacataatgtcctgcaggttcatctatgttgtcacaaatggcaagattctcttctttttgaaggccatatgaccctgtagtcaggagctggccttttctatcagccgcagattttggtctgtgtttcacttttaagatggttagctaagatgtgaaacaaagcaaattcttatgatcaatctcagttgtccttgctcttcagccattatttccagttttcagccagtggttttctatgtctgtggatacaactaaaccagttaccattaattttctaggaaggccaggcgtgttggctcatgcctgtaatcccagcactttaggaggccaaggtgggtgaatcacttgagtccaggagttggagaccagcctgggcaacatggcaaaacccactctgtacaaaaaatacacacaaaaaaattagctgggcatggtggtgcacacctgtagtcccagctacttgggaggctgaggtggaaggattgcttgagcccaggaggcagaggttgcagtgagccgagactgcaccactgcacttcagcctgggtgacagagtgagactctgcctcaaaaaagaaaaaaaatttctaggaaaatgtttaaagacatcatgccaaatattttatcatcatctgaatacaaaatatatcatttagcctttataaccataatttttaagaacaaatcttcgcatttttccagtgtgacctgttttgtactcctacaaactttatttcagctaacaatgcttatcctataattccctggtaaattatactttcatatcaaggctctctaaatgcaattattcttccccctcagaaagtggatctcttcagcctgggaattatcttctttgagatgtcctatcaccccatggtcacggcttcagaaaggatctttgttctcaaccaactcagagatgtatgtatcaggtgttttagtgcctacattttcagtaaccggaatcttagcacagagatcagaattcaaagcaggatatttttctggtatttataatatagaagaggctgccctactgtaattttaatgactcatttattcagatatgcaagactaaccagttttcccatttttagtgaaacatttttctgagcaaaggaagtcacctcagttaaattcttaaaatagcagttttgggagccaaagatcatcagcatgtaggagggatcttactggtctctccactatgtttccacagtgaggtaaatggaaccctacctctgatgatgggaaacttgccccagttttgtttgtttttggaaatcttacctggagaaattgctaggttatagttgctttttaaaaaattattctgagatttactcttgattttaaagcaaaggaagaagccacaaaattgggcttgatatgaatatggttataacaagggagtagattgtaaagaaatgggtatttagttctagaagttaaagatgcctgttgaatgggccagttgtagtaacgtctaaagaaaactaccaagaccagaagttaaaacgggtccgaaaaaaatatctgccccttgaaatgtttttcccaatgaaatttccatttgtgttcttgggattaatccttgcctcatttactgcctgagctaaaaagggaccagtgttacatgtgcgaggtcagagatgcccatgagcaaaccgcattaagatgaaagtgaagagtgaggtttgggtgagagtgatttaaattcacatatttatgagcgagacatctggagagccaccttctttcttactgagcagagtgaagcaggaatatttattaagttaattcataaacacgataactagaatgcagtaagaatactcctgtattccactataagaacacttctctggataattttgaaaacaaattattttactgtgagtacagtgtggacagctgtgttcgtaaagtataggactaagtgaagtgatttctattgcctcgccttgactgcaatgctcttagatgattatgtccttaatgaagtgcctttctttagtctaaaattcatgtttatttaccagaaaggtgagaacttttggggaagtagagattttttttctcttactctatctgtgttggtatatgggtgtggttttttttttttgttttgtttttttttgccttttttcatctgcatgtttaattaaactactttgttgttctctgaagccattaggtttttactttgtacccagatgtgctttctgccccttgaaatttttttctcagtgaaatttccatttatgtttttggggttagtccttgcctctgttactgcctgagctaaaagggaccaatgttatagtatgtgaggtcaaaggtgcagacagcattaggacgaaagtgaagagtgaggtttgggtgaggctgtcatttgggtaaagtttatattaaaataatatgtatgtaattggaagaataagcgtcaggtttcaagaaggtatcacctatcttttcttgctagcaaatttttatttctgtatttgattttcttacttatggtgaataaatgctttcactgtggcagtctgccaaaaccttgctgatttgaatatatttttttagcccacttcgcctaagtttccagaagactttgacgatggagagcatgcaaagcaggtaattttctgatgcgtcaattactatgtcttcagtcttgcattttaattattatttttcttctttttcaattagtaatcttctgccactcattctcttgtgtcctgggaacaacgtggggaaaaaatatgaaaagatgaagcacttaaaatgtcattagacttgaactacaccataaaaatgccaagggctggcacagaaaattaacaaactgcagggttcttttgtgcaattcgttgtgcttttgaagtgctatttggacccttggcttagctgttgaaaaaaaaaaagaatccttttacaactcattgtttttgataaagcttggggctttaagaaaaaaatataatttaaaactgtaattttgttctgttttgtggttgcagtagctcagattatgggggaagggttgcattttctggacagtctattgtcacagtattttaaagcaaaataaattctcctatataccataaatatctgagtatatgtgtgtgtgactcatgacataggctaatattggcatccagcaaatattaaaaaaaatattattggtgaatgtgtgtattgggcttctggtatgcctttcttctgagtgccagttgtttgtcttggtacagtggttaatactcttgtcatatggaagtttctcaaactgacttactgacaattataatcaaggcaaactccttatttaaatcattaatgttgagaacaaaagcatagatggaatattgtattaatttggtccttcttgcttgctggttatgtatctgaatggacatgccacttttctagactttaatttccctcacctataaaataaaaagattaagtactctttatttatattagcactaacattgtgtcatttggtaagtttaacatgatggttatttatggctgtagggacctattctgcctcatctgtttaattagtgaaggccattagaaatacattgagtcatgtttctgcttcttttggtagctattattgtttctgggtgtcataagtaaacattcatttcatagcctttccttatgacaaggtcagtcttatttggtgtttccccttgttgacagctaagatggcccaggaactatacaaaccatttttcaccatgaggactgcactcctaccatcagatatatattagatacccttgagcatttgagtctgggctgtacaaattggcaccaaaacaaaaacaacaaaaccacaaccacctcccatgtcatagtcattgctttttagctgaaaggaggaaacttagaagatgcttatagaatgagcatagcataattttttgccatgcacatttaccagtacagcagggtctattatgctcaatagggtattcttgtttttgtcagtttaatatacctttcataaaagttgtatcatgtcattttctttctatataatactcctatatcccatacaaactaattgcctgtgtttttattttaccctaatactggaaggagagtggtaggggggcatattttaaagatttataactagaaaatgcttaataaagtccatctaataattgaggttttcttatctcaaatatttctctaactccttataaatctttattataaacaagaggattaaacatcattaaggaacctctcaaaggtttagattgccttcatatggttcactgctttaatgaggtggctgtgaagatataacaaatcagtaacataaatcaagagaattcaagggaatggtatcaatgcaaataacataaatggagaagaaaccattaaaacaagatgttttacattgcttttaggattccagcagttattatgcattacaatttctactaaaattaggcatgtaaagctatttgttttatctttttacatctttttatacgatattttctgtgtttataaggcctaatttctgcttctatgtagttgttgatttgattttttttggttgtgacaataaggtataaaaacaaggggcctccttttaagaaatgttcatactacattgttgcacaactctgtggtcataataaagcagaaaaaataatgacctattcagaaatttcagaatgtcagttaagtgcaagaatagtggcaccttttctttgacctgaactgactactgacttgtccggagaatagctgagcattatccattgcatcccattagcagtgtgcctgggttttattgtagaaatcagtcatctcctggctgttgaaccacgatccagcaaaacggcccacagccacagaactgctcaagagtgagctgctgcccccaccccagatggaggagtcagagctgcatgaagtgctgcaccacacgctgaccaacgtggatgggaaggcctaccgcaccatgatggcccagatcttctcgcagcgcatctcccctgccatcgattacacctatgacagcgacatactgaaggtgggcttaagccacgctgcacaaagggagcttcaccttgtccacaaaaggatcaagccagtttctcacagattcttttaatgcctctaacataagttcttatgtgaggtattggaagcccctaaaagtacatgcaaaatgtgtgtatatgcattcagggaagaggacccatactttcagtcacctacttgaaggagtccttgacctttcctcctccctacccacccaagagattaagaagcagtgcctacaaaaattagccgtgcgtggtggcatgcacctgtaatcccagctacccgggaggctgaggcaggagaatcgcttgagcctgggaggcaggcggaggttgcagagagccgagatcgtgccactgcactccagcctgggagacagagcaagaccccaactcaaaaaaaaaaaaaaaaaagaaacagtgcatttagagactgatccctagcccaaacgcccagagccataagcatcaaccagctcatatctagatgaagtataaagtagttcccagtgctggttgcacatctacttcatctcagaaactctctgacaatgcagatgcccaggtcccgtagcccatctagtggctcagaatctccaggtgtgaggcatttcagaatctcattaaaagctcccaagcagtttctgaagtgtagccaggttgccagtttgggaagactttaacatttaatttcttttaaaaagaaaaaaaatctgaagcatattagtgaaatgttaaaatgtgttaaagttgggtgagtaggtaacaggtatttgttatattctctattatgtttctgtttgcttaatatatatgatataatttaaaaagatagagtagtggaggaagtcatagtaaaatttatgaaagatcagtatagattttagagaccaaacacaatttttactggctggcaatattattatagaaagatatttgcaggattataggtgacttttttatagatgtcttttttcatatgtgttgtttctaaattttctatagtgaaatggtactacttttataatacaaaaacaaatgaaaaagaaagctattggcaaaatatgtaaatgccatgtagctttcaacaggcctgccatgaatcaccttggtatgtgggaggggcctgatgctgttaggtggtcatcgcgccacagtatccctgagagtcagagagaatgtgtttatttgattatctccctctgaaaggcaaatatcaatgtggccaagaatttggactttgaacccaggcatccttcccattggttgaaaggttagctcttgctttccaaagcaggccatgaaagatatgtgtcctcttccctgatgtgttcaaagagggatggacttgtcaagacttgttttttgaacctggaaataagcagtgtagtgcctactgcaagccacagattaatattttaaaggatccctttgataaggcttcaatgatgatgttttaatcggtcctgttttagggcaacttctcaatccgtacagccaagatgcagcagcatgtgtgtgaaaccatcatccgcatctttaaaagacatggtatgtacgccctttttaaaaatgatatttcttctcataagacttttttcatcattagaaagtactgttagtgttcgggcatatcatattttactttcaaattcagttataaataattgacatcatatggaatttaagcttatttttgaaactgatttgaatattacagccttactattaatactaaaatgcaattggtttgtggagtcagaaatatgaccaaactgtcaaacttaactctagatgagctctctatttataaatttagagaactcaagaaaaattgatatgacttcaatggtcccagtagcaattacttaactgtcaggtttgtgttaattttaggttgccttctaaggagaatgtgaacctgatgatgagctattttttctcatttggtgtaggagctgttcagttgtgtactccactactgcttccccgaaacagacaaatatatgagcacaacgaagctgccctattcatggaccacagcgggatgctggtgatgcttccttttgacctgcgggtgaggctgggaacacactgctgacaatcagaatgctgtatctagtcacagggatggcatctctgttaaaggatttttcccccaggcttatattataaatgtcacctttgggaaatgtattcttgaggaagttgtcagagtgagagtgttactggggtggaggaaatgtttggtcctgaatgcctccaccttcctaatagctcaggtgtttatggctctaggaactggaggaaccctgcattgcaggtgccacatgtgcaccccccagtgttgagtgaccacagcaggttaaccccacccacttagacaaataaatgtagtttgtttgtctttttaacttcctggctagatcttcagtaaacatcctaacatgttaatgcctagaacagttaaattcttctaacagcaagtgtctctcctaattgggtatgctgagttttgcccgtgcctgctttcttccgacccccagggatcctgtcgacagcagcagtcttaactagtctttcactcacacagtgttggctactaacaagctatctgtggtgctgtatgatagagcaaggaaaacatgcaatgcatgtgacagacaaggtttaatacctctcacatacagaaagcactgacaagtggagacatgagcaaaggatataaccaggcagctctcagaagagaatatgtgcatggctgataaacttctgaaaagctgtactgcctcaccaataataaagaagtgcaaagctgtctcaacttcacccatcagacaggaaacatttttaaattaatgttatccagagatgacaggagtgtaggaaagtaggtattttcatatgttgctgatgggaatgtggactgctaaacctttagaaaagtaatctaaaagtttataataaaactttaaaaattttgttgcacattctttatccttagaaccagcaatcccactttgagcaatttactcaaagaaagaaaaacacatcagtgtatgaatgttaaaaggatgttaattgccatattattgtggtagtcaaaaactgtctgtctgtttatcagtaggaaaatggttgaataatttgtcaccaatattatggaatattaaggagctattgaaaagaacattgagctaggcacagtggctcatgcctgtaattccagaactaggctaggtaggaggagtgcttgagcccagtagttcaagaccagcctgggcaacataggaagaccccatctttacaaaaaatttaaaaattagcccagtgtggtggctcgtgcctgtggtctcagctacttgggaggttaaggcaggaggattggttgagcccaggaagtcaaggcttcagtgagccatgattctgccactgcactccagcctaggaaacagggcaagactctgtctcaaaaagaaaatttaaaaatttttttttgtagaaacgggctctcgctgtgttgcccaggctggtctcaaactgctggactcaagcagatccttctgcctcagcctcccaaaatactggaattacaggcatgagccgccatgcccagccaatctatatttttatatagatcaaatatgtattttttatatatgtataagatgaaaatacagtcagctcttcgtacatatccttggattccacatccacgtatccagccaactgtggatggaaaatactcagaaaaaaaaattccaacaagcaaaatttgaatttaccatgtgctaaacactgcattgaatccacacaaaagaagggatgtataggcatagtagtagatattataagtaatctaaagatgatttaaagtgtacaggaggatgcgcataggctataggcaaatgctctgtcattttatatcaggaacttaaccatccactgattttggtatccttgggggagtcccggaaccaatttctgagggacaactatacatatttagatatagccatatttatacttgatttgtaggaatgtgcatggcacattgttagctttttttaaaaagtaaatttcaaaggaactctattatcccatttttattatagagaaagaaaagtttttttaaaaaaattgtgtgtgtacaggaggctgaggcaggagaatcacttgaacccgggaggcggaggttgcagtgagctgagattgcaccactgcactccagcctggacaacagagcaagaccctgtctgaaaaacaacaacaacaaaacaaaaaaacaaaaaactgtacataaggtatactgtgtgtgtctgcatgtacttttttgttttatttttttttttgagatggagtctcactctgtctctcaggctggagggcagtggcgtgatttcagctcactgcaagctccgcctcccgggttcacgccattctcctgcctcaccctcccgagtagctgggactgtaggtgcccgctaccatgcccggctaattttttgtatttttagtagagacagtgtttcactgtattagcaaggatggtcttgatctcctgacctcgtgatccgcccacctgggcctcccagagtgctgggattacaggcgtgagccaccgcacccggcctgcatacacttgatatatgtgtagatatatatatttggccctctacatccttgggtggtttctgtatccatggatccaaccgaggatggaagatactcagaaaaaaaaaaaaaattcacaaagctccaaaaagcaaaacttgaacttgtcacattcacgtgtctgaatgaccgtgcacatcaggttgtttgtatcaccaaagagtaaggtgtcaaagaatacactcattttgaccatactttttggaggggggagtggaatctttttttaaatgtatgtcatatggcttattgtgaaacaggttttgtgtttatagtctaagaagaaattccttccacattcctcacttctgtttttcttttatagtgagtaaagtgatgtgggattattctgaggtagaggtaaataaacagcaaatcagatgagacatttgcgttttgttgaaaaaaaaagaatagaagtacaaatatttacatagctatacttaaagctggcttcttattctctaaatattaggagactaaagtgcagatttttaaatatcagctcccattctataagctgatattgaaatgcaaaaaattaaaaagtgaatgtatgttgagaatttggcccatcagtggtaatgataccatgttggatctgttggggcaatctaacaatggttttactagttgtggttactatttgaaggtgtttattaagaatttattctaagagattgataggaaaatcaggaaattcaccataagagataatacccattttgactgcattactataaaagtgacattttttttaaattcataaataaataacttgcactaattttagttggacataataaaagctccacagagaatatttaactaaaagtgaattttaaaaaaaacctaagaaatgccacagtgaataaggttgatggtatgtctagcagcggagtccaccactgaccaaaacactgaagaacatttcagggagtgtgagtggtgagcagtgcataacttagtgaatacactaaaagccactgaagtacatactttaaaggggtgaactttatgggacaggagttatgtttcaataaagccgctattaacaaaaggcacattttgacattgacctttcatattttgtttatttttcagatcccttttgcaagatatgtggcaagaaataatatattgaatttaaaacggtaagaaacaataggagattccatttggtagacataggaaaatagttgaataatttgtcaaccaggaaagaatattttatttcctgtgatccttacacagttaagaattctgggttcagaatattgagcttagaatatgaaccagaagcccagccacagtaccccttcctgtaaggtaactaggactgttagaaggaatgtagcaggtaggtaccgtcatgttcccacagtctattctgtaccttctaaatgtccccaagcaacattactaattattttcacaaacggttgcttgataaaaacatctggctgttcatgatcacagatggccccttttaaaacttaattggtgggacaaatggccagtggtctctatgtgaaaactgcctacacaggtaaccgaacaaaagctgcttgtagagaagtggagtaaacccagcaggaacgctgagcgctgaggacctccaggcacttagccctggaaaaaggctttctgtacattcaaataccacaggggtccaacactgagatcttcataatttggagcagtattgttgtcaatgaggcaccctactttaaagctcctttcttcaactgaaagcaaagctctttacatgcttttattctagctacaagtgaataattaataatcgtagtcctatggtgtgggtatccctgtgtagaaagcaatcactaaggtaaaattttttggtgtaatttcatctctatttcagacatttaaaaaaccttaagccccatagcttaatagtggcaaaactgggaattggaacctagatcacaaggcaaggctgttccaggtcaaatttgtctttcagtcctcttgatcataccaccgattaattttttttcatatttgtttcttatatcttgttcaacaatttcttatacatatttctttctagtaagcaatgaccttagaaatctgggtttctctctccagatactgcatagaacgtgtgttcaggccgcgcaagttagatcgatttcatcccaaagaacttctggagtgtgcatttgatattgtcacttctaccaccaacagctttctgcccactgctgaaattatctacactatctatgaaatcatccaagagtttccagcacttcaggttcctttccatattttaacattccaagattccccactatatttcttcaccaagtgtggtggggaaaaccacagctacagacctgcttctcagtctgtcctgcagatgaatcacatctttactaaagtaactgagaagagcttgctggtgttgcttttgaggttcagctcaggctcttaccttcacaggaactggttttgttttgggggatgggtattctctgcccattcttctaaaatgcaagatatcaggctaagattcctaagatgctcttagcctgttcataccctgtttggaaccctcagtggctctatcctacacccgatctcttcactccccaacttcccttttcaccaagtctgcatgctgcctagctggtggggactgctgccagcacttctcaggcttccctccccaccccacacacacaccctgtcattcctgccaccgtcagtcaaatgttcccttgtctagaaagtctttgcccagccatggtttgggccctttctccccaggaagcctcactgcaccctcattaattagttggccaccttttcttctcaactctcacaggtcttgatctgagacacccatgtactaccttgagttatgttcattgttttctccaagcagaacatgtgtttttagggcagagcctacgagtccgctttgccatatacccccattgcagccagctcggcacatggctcaccactcggtgaatactcattaatcgatttgtgtggacaaaagttaacaataactattccactggcctgtgcttatgagtcgattactactggaccagatccttctgtctttgaaatcaactctctcgggctttttaacatagctgaagaccagtcagagttgtttttgttttgttttgttttgttttgttttgttttgttttggagacagtgtctcgctctgtctcccaggatggtgtgcagtgatactatcacagctcactagcccctaccttccaggctcaagcagtcctcctgccttgctgcttgaatagctgggtctacaagcatgtgccactgaccccagctaattttttatttttttgtagagatggggtttccctatgttccccaggctggtcttgaactcttgagctcaagggatcctccaaccttggcctcccaaaatgcttgaattacacaggcatgagccaccaccccagccagtctgagtactttggatatatataatatagtattaaattagagtatactctgactataacagtgcaaaaagaatgtatgaaaaaaaaataaactaggaagccatatgctaaattcaatccttccattgtgttaggatgacaaattggtggtaagtttccagatttggtcatgtaccagtaattgcttttataatgaaaatagtaatttttctccatatcccaggaaagaaattacagtatttatttgaaccataccatgttattgaaagcaatactcttacactgtgggatcccagaagataaactcagtcaagtctacattattctgtatgatgctgtggtaagcatttaattacttatgatgttgaaagataataccttgatgttgaaagataataataatagttcctgatgattttcttacccatgcagccatgaaactgaattgggagccttatctccttccttcattgctctaaattgaaagaaccaattgattttaattatatcaacagttaacaagtattggttgagcttttgttccatcctcagccctgtactactaataacctccggggtgttttttaaaaggctaacttctaattttaaaagatcaaattatttaatttgtcagatagtaaagttattcaccaacctacttattaaggcaaatcactaagtaattggtcctgatacttgccaataataatttcaaagatagttaacattgactgagccccgctctgtgagctaggcattgttctgagctcctctgatggatgaactcacttcattctcacaccagtgctgctattacctttcctttagagaccgagagcaactgttcatgttgagaataaacagtgtgccttgcccttgattcttccagtctgcctgtgcttatcagtaaagtcatgtatagatttgcattgattgaattaaggcagaatggcttcgaactctggtggggcctcatttaccacctccttcctgtgggactgaggctatggcacctccagttactcttccctaatttagtcacatcatagtattcattactttatagtatatgtgcgggtacagagactggaaggggacgcattgaaaaaatgaattagtgttatattatgatgctaagatggaagtgaatgcttatgttttctaatatcttttcatgttaagttttgttttcataatgaataagaggcatccaggagatgtaagaactaacagcaccagaagtctatggttaagacagagtagtggaagtcctcacataatggcttattgtttttatacaccaaaaggattaactagcttttctttcatctggcaggtacacatcaatggcccaaactttactgcttgtttcttagtggttctttactccccctaaagctctgctgctgtttgtcagtgacagatacaatatgatgtcaatcggacactggcagaaaccccagggattgtgcaaggggcttcagctcttactgattcatgtcctgcggctacggcacatctgccagcgtgggatgaaatgcccagagcctggcctttgttaggggagcccagagcaaaatgactccctccctgcccaaacaaatgccctcattaagcctgtccagatttgggtcacctcaccattcagcaagtacaactttccccttttaattcttttgtcagggtttttcagattttaaaataagttaattacggttttgtgtgaattgggagaaaaaattttttaatcacagaattcaatctatcctgtaccattaggagcagtttgttcaaaatgaaggctatacttgttagaattcgcctggaaattgtgtcttgttcagtgccagatttcgcgactctcattgttacctttttcttccacgttagacagagaagctgacgaggagagaagtggaagctaaattttgtaatctgtctttgtcttctaatagtgtaagtaccttctaatggtattattacagctttctctgtaattttgtgataccagaaaatgtcatcaaattctcgttgcagtagggtagcagccagcgcttcctaccacctcgcagatgcagtttttcccttgagtgttaggtaccatggcaacctctgggattaggagaagggagaaactaatgctgtgatcaaagaatgtctctccatgcttcttcttgatacgctgtaatcatcctgctctttcttgatcagcagatacttttctttgtcaccccttatagagctgtgcctggtagagcctcctgctgaacatacctaataccagttgtcctcttttgaattagattatacaggactagaaggaggcacagaattctgcaaattcatctggggagctacccttcccctacctccatgtcttctaactcctcagagttgaattaaagctctagcttttctggtatatctcttaatcttaaaatcttacatttgatcccatcatcaataagggaaatcttatggaataaacagtttggtcatattctctctgtaggcatcagattgatcccagatctttggtacagtaacccacacttaattgagtagctgaacaacagaatacaacagggattttgtacattttcctgaatatttaaataaggaaagtttttttttaatttcccggaacctgtctaggcccttgtctgacactcaattatatgatcttgcattgatcagcaaaattcacatatgggatagattaaaatatgattgtacacagggcaggaagagtcactcaatctttcggacacctacagtgtggcaggcacaatggcagggatataaagaagagtccatagactgcattcagcttcttggttcatattggcctttaaaaagccataaggggatatgcacagcatgtatctgccctcaactctgtaaaacagctttcagagggcacacggaaaccagagttcaaagaaatcacccctttgcgggtagggaaagtaaaccagatgcatagcactaggagttctgaaaattgagccaggttaaatcttaaatatttaatattgggggagatagtaatgatatgcaaagtaacacaacagctaaatatccaaatatgaaggacaatatacagtatttacatataatctaaacatgtacacagcacacacctatgtgcagaaatagtcccatgtgtaaatagcacagagaatctgcacaagactgctcagttcaatgattctatacccaagtttccaacccaaaaggttatttggactaaagtcacatttcagaacatctttttttttttttaagaaagtcttataaatatacattcggacgtaatagccacattggttgttcacatgtcaacttcttttctttctgttaaatctctaaccactggttattcgatgatgctaagtgttaattagacgtgtctgattcagttaaaaacagaaaaatagtatctaataaaggcatttggtactttgattattttaaaatggactctaagggtattaggaaggggagtagaaatattgccaaagagtttcacatatctgacccagtcctcttatttcacaaatgagacacctgaggcccaaagagatgttgtgatttgtcctgagtcacatggagttagttgatgatagggtgaggaccaaaatctggagatattgacttcagtgcttctggtagtttattattggggtaatttaatgttcaaatttatagagaagaaatcatttttattttcttaaaaaaatattttaaatcgaatacatgattttaaatttaaatttttttctttttatttttttgagacagggtcttgcactgtcacgcaggctagattacagtggcacaatcatagttcactgtaacctcaagctcttgggctcaagagatctttctgcctcagcctcccacttaatttttttttcttttttatagcgggatagcaggcgtgagccattgcatccagccaaaatttttatctttaatccctctattagtctgctgtcacactgctaataaagatatatccgagagtgggtaatttataaaggaaagaggtttaatggattcacagttccacatggctggggaggcctcacaatcatggcagaaggcacggaggagcaagtcacgtcttatatggatggcagaaggcaaggaggagcaagtcacatcttatatggatggcagaaggcaaagagagagaacttgtgcagaggaactcctctttataaaaccatcagatctcgtgagacttattcattatcacaagaccagcatgggaaggacccgcccccacgattcaattacctcccactgggtccctcccatgacacaggggaattgtgggagctacagttcaagatgaaatttgcatggggacacagctaaaccatatcattctacccatggcccctcccaaatttcatgtcctcacatctcaaaaccaatcatgccttcctgacagtcccccacagtcttaactcatttcagcattaactcaaaagtccacagtccaaagtctcatctgaaacaaggcaagtcccttccgcctatgagcctgtaaaatcaaaaacaagtgagttacttcctggatacaatgagagtacaggcattggataaatacacccattccaaatgggagaaattggccaaaacaaaggggctaaaggccccatgcaagtctagaatccagcagggcagtcaaatctgaaagctccaaaatgatctcctttgactccatgtctcacacccaggtgatgctgatgccaggggtaggctcccatggccttgggcagctccccacctgtggctttgcagggtacagcctccctcctggatgcttccatggactagcatttagtagggactctgtatgggggctgcaaacccacatttcccttctgcactgccctagcagaggttctccataagagccccacccctgcagcaaacttctgcctgggcatccaggcgtttccatacatcctctgtaatctaggcggaggttcccaaacctcaattcttgttttccgtgcatctgcaggctcaacagcacatggaagctgccaaagcttggggcttgaaccctctgaagcaacagcctgagctgtacataccttggccccctttagccatgggtggagcagcttagacacagggcaccaagtccctaagctacatagaggaggggggccctggggccagcccacgaaaccattttttcctcctaggcctccaggcctgtgatgggagggcctgccatgaagacctctgacatgccctggagacattttccccattgttttggtgattaacacttggctccttgttacttatgcaaatttctgccgctggcttgaatttttcctcagagaatggggttttctttcctgtctcattgtcaggctgcaaattttctgaatttttatgctctgttttccttttaaaactgaatggtcttaacagcacccaagtcacctcttgatgctttgttgcttagaaatttattctgccaggtacccaaaatcatctccctcaagttcaaagtttcacaaatctctagggcaggggcaaaattctgccagtctctttgctaaaacatagcaagaatcacctttacttcagttcccaacaagttcctcatctccatctgagaccacctcagcctggatttcattgaccacatcattatcagcattttggtcaaagccattcaacaagtctctaggaagttccaaactttcccccattttcctgtcttcttctgagccctccaaactgttccaacctctgcctgttacccagttccaaagtcacttccacatttttgggtatctttacagcccaactctaccggtaccaatttactgtattagtttgttctcgtgctgctaataaagacatacacgaaactgcgtaatttataaaggaaagaggtttaatgaactcacagttctctgtggctgaggaggcctcacaatcatggtggaaagcaaagaggaacaagtcatgtcttacatggttggcagcaggcaaagagagagaacttgtgcagggaaactcctctttataaaaccatcagatcttgtgagacttattcactatcatgagactatcatgggaaggacccgcccacatgattcagttacctcccactggatccctcccatgacacatgggaattgtaggagctacaattcaagatgagatttgagtagggacacagccaaaccatatcaagattataggaggttttaacattttttgggttttttaaaaatttaagtgatttatgattaactctaagattaagctatgtcaatctgagccttcatttagcccttaggtttcatgtgccaatttatggatgaactaggttgtacttgcctacagtcttaaaatggctataattttgtttcttaataatttctactttagctcctgggagttttctttctggctttatgactatggttgtttcctcttactccagctgagtaccagggactgtgagatcaatcatctctagccactgacctcttctggggcagtctatgagtacagctggtgacagccaggatctggcatccaggtgggaggagagggaagggaggatcaggaggctgcccacaggagaagacatctcaaggttgcaaataggaatgattcaagccaaggaagggaatttctagctaattctgtattaaaacaagtcagactttgccttattgtccccccatgtctatgcctgcagtaacaggaattcatgagaataagaaaggtaaagaggaaaaatactggcctgaaaatagataatggaagctctgctagtgccagggtctgctttgctggggtcagcattaagtgtgagtaaatgtatctgaataaaagtgaaccatgagtatgtgtctaaagcattcctgcaaggtgctttcaagttgttggaaaaggataatccttagtcaggattgtggcaaagcctaaaataatctttgaccacaaagataatcgtagcatcccatgtgctcctgctcctgcaggtgcacacagtcggtgcaaagggagtcttcccctgctgtggatgggcagctgactgtgcccctttgctttccagctgtgtcgactctacaagtttattgaacagaagggagatttgcaagatcttatgccaacaataaattcattaataaaacagaaaacaggtattgcacagttggtgaagtatggcttaaaagacctagaggaggttgttggactgttgaagaaactcggcatcaagttacaggtttggcaacagtttgatactggcagtacaaatgtgtagcattactaatagcacagggaggaaatgtgtttcatttcactaatgctagttagtgttttatttttccagaaaaactgctttctgtgttttggagcatttgatatttagtaataattttggcttaaatcaggatttctttgcaagtgccactgttcctatcatgaagcagttcttactatgttagcctcagagaggtggttattcttaaagagaagagaatttattttacttgtcaggctatggttaaacagactttgagctagatcttactgaatattttgtttatgctaaatagattgttctgatgctattgatgggaaacaccattttcagcattatattccacattctaaatttcaaacccttgacacatttgtgtggcatctctctttataggtcttgatcaatttgggcttggtttacaaggtgcagcagcacaatggaatcatcttccagtttgtggctttcatcaaacgaaggcaaagggctgtacctgaaatcctcgcagctggaggcagatatgacctgctggtgagggcttgccctttatttatttgctctgacttaattttatttcttctaaacttgttattttgaaattttcaaactaacaccaaaaatttgaaccagtaatatcattggatacttctattaatatatgtttcatctaggaatagaaatataatgtgaaccacatttgtagttgtttaagcttaaaacaattatattattttgcaagatagttgcaaagatagtactgagagggctcatgtaccctttactctgtttctatatatatatatatatatatatatatatatatatatatatatatatatatatgtattttggagacagggccttgctctgtcacccaggctggagtgcaatggcgcaatcttggctcacagcagcctcgacctccctgggctcaaatgattctctcaccttagcctcccgagtagctgagactacaggcatgcaccaccacacccagctaattttttgtattttcagtagagacagggttttgccatgttgcccaggctggtctcaaactcctgagctcaagcaatccacccacctcagcctctcagagtgctgggattataggtgtgagccaccacaccaccccttgcataagtacagtaaaatatcaaaaccagaaaattgacatttgtataatgtatgtgcatcattcttctccattttatcacgtgtactttccctcaacaaccaccataatcaaggtacagaactattccatcaccacagagatttatgggtatcaacatcttatcaattcaaatgaaatgtagaaactttatctccctgtatgtctctttacctcatgccccatttataatataattgtcttaaatatttcttctaatacattgagatccacatcaaacagtgttaaattttttactttactgttaaatataattataaaactcaaggggagaagaaggtctattgtatttaccccaaatttctggtttgtgatgagaaatttgctgttatttgagttacttttcccctataggaaagttatttctgacttgatgctttaaagattattttctttgtctttagtttcaaattaaatcatgatgtgtcttggcatgagtttctttggatttatcctgtttagggtttgcttagcttcttaaatctataggtttatgtcttttgcgaatttggaggattttttcaggcattctttgattttttttttcagtctcacactcttttttctctccttctatgaccccagtgacacaaatgtccttgaggttatgggacatttttgtccaggctgatctcacactcctggctgcaagcaatcctcctgccttggcctttcaaagcactgggattgcgggtgtgagccaccacacctgacctgtaattttaaattatttagtaacattaagtaaaaggagacaagtggtattaattttataatatatcttatttaacttagtatatccaaaatattatttcaacatgtactcaaacttctaaaaattattaacaaggattttacatttttttcaaagtctttgcagccagtatgtgttttacatgtacagcatgtgtcaatttggattagccatatttcaaatactcagtagtcacttgtgactagtggctgccatattgaacagtgcagagttagatgaaacatttgttaatattttttctaaatttgcatgtgtgcttgcttctctattttactacacacacacatttctttttgttgaactctttgatgatgagctgctgacagagtgctcactctttaatcattgttttccccgtaatcacagtttctttcctatttcataaccataactgtttgtgtctctccacagattccccagtttagagggccacaagctctggggccagttcccactgccattggggtcagcatagctatagacaagatatctgctgctgtcctcaacatggaggaatctgtaagttctggcttggcttcccagcatacttcgaggtgtctttcatttctaaaagtatgatttgccttttgcagtcatttacatggggcttctgatgtgaaagctatagacgtagggttttgaaacttacctttaatatgatagacaagcctaagacttgatgtcaatccctgcatttcagtccttatcatctgttctctagctggacgaccttagaccaggggtccctaacccccaggcagtggactggtacccatccagggcctgttacgaaccgggccgcacagcaggaggtgagcagtgggcaagcaagcattaccacctgagctccacctcctgtcagatcagcggtggcattagattctataggagcatgaaccttgttgtggactgcacatggaagggatctagactgcacgctccttaggagaatctaactaatgcctgatgatccgagatggaatagtttcattccaaaagcatcccctcccaacccccgcaccatccatgaaaaattttcttccatgaaaccagtccctggtgccaaaaaggttgaagacttctgccttagacaattaattcatccttccctagactcattttccttatctgtaacgtaccatataaatgtgagatgttatagttgttaacaggctcttaacaaaacttcttgttcaggccaggcatggtggctcatgcctataatcccagcactttggaaggtcgaggcaggcagatcgttgagcccaggagttcaagactagcctgggcaacatagcaaaaccccatctctaccaaaaaaatacaaaaattagctgggtgtggttaattagccatgcacctgtagttccagctactcaggaggctgaggtgggagaatcgtttgaacccaggagggggaggttgcagtgaggtgaaatcatgccacttccactccagcttgggcaacagagccagaccctgtcaaaaaaaaaaaaagaaaaaagaaaagaaaagaaatcctgctgtggtctacaaagctagaaatagctttttttcccccttgtatttcaggcaagattagttttcctagagaaaaatggtattttccagatggctcagggtagttgaaataatttctgtcttgaaagactaacataacattttttttttttttactgtggccgagcatggtggctcatgcctgtaattccagctatatcccaataaggccaaggcaggtggatcacttgaggccagaagttcgagaccagcctggccaacaagcagaacaacatccctactaaaaagaccaaatatatatatgtatatatatttatttatttatttatttatttattttagccgggcatggtggtgcacgcctgtaatccagctactctggaggctgaggcaggagaatggcttaaacacaggaggcggaggttacagtgagcggagatcgtgccactgtactccagcctgggtgacagagtgagactctgtctcagaaaaaaaaagaaaaagttgtttgagtgtgtcttttttttttttttttacaatgtgttttgaagcaaagtctttggcacgctgtgtttctatgcaggatttcaagaatgcccatcttcccaagagtgctgcctcccctcctgatgctggtttcacttccatgcctgcagtcttgctcctctaactgtaaccggtctgtttctgatccaggttacaataagctcttgtgacctcctggttgtaagtgttggccagatgtctatgtccagggccatcaacctaacccagaaactctggacagcaggcatcacagcagaaatcatgtacgactggtcacaggtaatgggacaaaaagcacctgtgagtgaagtgcaaattgctatggctttcatggcaaatatcctctgcacctatagactgtcaaactctgtttatctctgtaattcgagttgcctcctgtgttagtttctgattgctgcagtaaccaattaccacaaacttactggcttaaacacatatttattatcttacatttctggaagtcagaaatccaaaagcactttcactgggttaaattcaacagggctggctcctctgggaagctctaggggagaatctgtgtccttcccttttctggctcctagaggcctcctgcattccttggctcatggcctcttcctccatcatcacactcagcaatgaagcgcctccttccttgctgacctgtgcttctgttcttacatctgtctctaactcttgtctgtccagctccctcatacatgcaccctgtgattacgtggggcccacccagataatcctggttgatcactcacaggttctaggaatgaggatatggacatctttgcggggctgtactccagcctgccacacttctgaaggcactcagtgcttagtgtgttttgggctctgtatcctgagacctcccacagcatgcaggcctgacacttgccgtgggtgtggaggtgtggaaagtggcacccaggacacatgcctgccctttggaatgggggcgtaagcagaccatagaaggggtgcactcccaggagatcatccaggttgtacccacattcgcccacactaaaggtgccccagagcatggcgatgaccagggacacagacccaccaccctcccacctgctctgtttacatcacctgccaggaggcttctgaagctgctgctgtttactcgtgtgtgtgtgttgtatcaaaattcacatcagaagtgtgctgagcaacaatttttaatcatttgacagaacagtgtcctcttctacttgttcacatgtttcataaatcattagagaagtgttctgtcctgcagtaaaatccaagcctcgtggccagtgacctcagtcctgcacagtgacaccccacaggcttctctgccccctcctggtttgcttcttcagttctgcttttcaccttcccttatttcctttgtttccttcattttcctcagaggctttttcagcgtgtgtgtgtgtgtgtgtgtgtgtgtgtgtgtgtatgttgtgttgtataattttgggcatcttttattaagtcttgaagcttttgaaaacctcttactattgattgattattcatggccctttaaacaatcatgaagggaagggaggcaagagaggccttgttcctcccttgaattctatgcggcttcttgcttaatatttatatccccctgaagtcagcattttagtaattcacattgagaatataattggaaacagtattttcattctccttaattacttgaagctgttccaggtgctctgtgtttattttctttactatgtttgtttgtttcagtcccaagaggaattacaagagtactgcagacatcatgaaatcacctatgtggcccttgtctcggataaagaaggaagccatgtcaaggtaaagacgtcagagattttttacaattcaatagttaggtgttacctgtggagcacctgccttcacactgaggcccgggccgtgtaggtgactggaaatccgttccctctactctccctttccattgttgggtttcttttttttttttgagacggagtctcgctgtctcccaggctggagtgcaatgacgcaatctcggctcactgcaagctccgcctcccgggttctcgccattttcctgcctcagcctccccggtagctgggactgcaggtgcccgccaccacgctcggctaattttttgtatttttagtggagacggggtttcaccatgttggccaggatggtctcctgacctcgtgatctgcccgcctcggcctcccaaagtgctgggattacaggggtcagccaccgcgcccggccgttgttgggtttcttgctgaagaaaatgtgtataaaataaggaagagagtccaccttcattaaagctttaaaaagcaaaacaaacaaaaaaactggctgtggttttttcctacttttctcctcttgttctctttttccagctaagaaaataagaataagtaaagttgtatctgctgataggcatatcctctcattgctttgtaaccaattttacttttttgtattcaactaaaagtgttcataaatataccacctcataacctttatttctaattatttttaaagggaaaaaaactttcttaaaaatatttttctcttctaatttttttttggtttcgatatcagggtaatgttggcctgatgaaatgagttggagagtgttctctcctcttctgttttctgtaagatactgtatacaattagtattagaagtccaatctcaaatatttctatatatagagctattctggttacctctttcttctagaggcagctttggtagtttatatctttcccggaacttttccatttcgtctgagttttcagatattcccctgttattgtttcactgtctctaggatctgcagtgatgctccctccttcagacctgatatgggtaatttgtgtcctccctcttttttgtctaatcagcctggctagagattgatcagttttgtctttccaaggaccagcttttggtgtcattgatttttctcagtttttatttgttcatgtgttttctattttattcatctccactcttatccattactattttcttccttctgcttattttggatttagtttattctttttttagtttcttcaggtagaactttagatgaggtattgacaaactacaccttggaccaaattcagcccatagcctgcttttatatgtctgtgaactagaaatttttacattctttgttaaaaaacaacaacaaacaaaggagagtgtgtgactccaactatgtatggccctcaaagcttaaaacatttcctatctggccctttacagaaaaaaatttgaagctttgttattatacatgtttaggattttatatcttcttgatgaattgtcttcatcattataaaatattccttatccctggtaatatttcttgttctgaaatcttttggttagtgtttacgtcactacctttctccatccttttatttttaacctgtcttttttttttaagagatgggggtctcatcatgttgcccaggctggccttgaacgcctgggctcaagcaatcttctcacctcagcctccagctgggatacaggcgtgtgccactgcacctggctaacttatctatctttatatttaaagtgagtttcttatacacagtcactaggttgagttttcctttttttttttttttttttttttgagatggattcttgctctgtcacgcaggctggagtgcagtggtgcaatctccacttgctgcaacctccacctcccaagttctcctacctcagcctcctgagtagctgggtttataggcacacaccaccacacccagctaatttttgtatttttagtagagacagggtttcaccatgttggtcaggctggtctcgagctcctgacctcatgatccacccacctcggctccccaaagtgctgggattagaggcgtgagccactgcgcccagcctcctttttttttttttactctgagaatcctggcttttttttgtttttttttttgagacagggtctcactcacctatgttggagtgcagtggcgcgatctcagcttactggaacctgtctcccaggatcaagtgatcctcccacctcagcctcccgagtagctgggactacaggcacgcaccaccatgactggctaatttttgtatttttagtagagacgaggtctctactaaatgccaaatgccatgagatttgctaaatgccatgagagtcctacagataaagttctccaagggtccctcaggctgggagatttacataagaggcagcagtgaagtcttcaggaaggtgctgggatttatcctaccctcaagaattcgtggtcctggaagggccttttaggaagagggaactgcaaaggtgatggtagttcttttagtagttgtcccaaagatagaggcaggccagcagagaaccattctggtacaaccctgaatagtctattttgggtgagacagatggatcagaagcagaaaatggttatagctacatcatggagagcccaaatgccaaccaaggaatctggtttttttatttagcagttattggggaggccccgaatgttttgaacagaaggagacatcaaagttgtgtttgagaaaaattaatctgcagggatgtgtagcatggaatagagtgagggagaaaccgaggacagtgatagcagtataaagaatatcaaactagcctaggccaaggttgggtgctggccaggggagtgaagatgaagggacagatgccataaaagtgggatgacaggacttgggtttagaaaggagagggaggagtggtagatgaagctgagatctgagaaaccttggtggctgaccagatttaaaggggaagatgttaaagaatcacatgaaatgagagcccattcatcttggccttaaaaaaaaaaaattctatcatctgtgataaactagtccagaccagggtttctcaacagcagcgctgttcacattttgggccaaataattctctgttgtagggggctgtcctgtgcattaacagcatctctgaccgctacctactacatgccagttgcaccatccaaaaatgtcaccagacattgctaaatgtcccctggggagcaaaattgaccctggttaagaaccactgacccaaactattgatttagtagtcttactgtggtgctctgagctagtcttctgggttcagaaacctccaaatgatagatccgtttcattctttttaaggttaagtctttcgagaaggaaaggcagacagagaagcgtgtgctggagactgaacttgtggaccatgtactgcagaaactgaggactaaagtcactgatgaaaggaatggcaggtaacttaggaaacaaaagccgagaaaagtgacttcagttacctatatggaaactacgtaaatttattttaaaagtcaatttgagccaggtgctgtggctcacacctgtaatcccagcactttgggaggccaagtttggggaatcacttgaggccaggaatgcaagaccagcctgggcaacataccaagaccccatttctaaaaaaaaaatttttttgattagctgggcatggtggtgcattcctatggtcccagctactcaggagctgaggtgggaggattgcttgagcccaggaggtcaaggctgcagtgagccatgttcataccactgcactccagcctgggtgaagagaaagaccctgtctaagaaaaacaaaaagaaagaaatcaatttgatccttttgagaaacaaagataggtcaggattacttttaatgaaccattctgttgcttctgaataactcaatcaggagtttaattgtatgaccatcttgtatgagactaatcatagcttacattcaacatttgttcttcataccatttccaagaatactttatcattttgaaaagcctcaggagccaaaatctatctgtcattatcttattcagtctgctaatcagtgaatttcaataatattttgtccgtgtactttgaaagatgtaacgttctgggaaaagatctcacttcctcatgatgggagtatcaaccatatgggtaggaatttgacaaagtaaattaaaagccttaaaactaaacattttttttaaattgacccagcaattccactttcaggaatttataataaaaattattttaaagatgtctatcaaggctcatttataacagcagttctcaaactttttggtcttagaacccctttacacccttaaaaattatttcaggatcccaaagaacttttgtttatgtgagttatatctataaatattaaaacataaacattttaaatatgtttattcatttaaaaataacaataaccccattacatgctaacgtaacatatttctattgaaaaacaactgttttccaaaagaaaattaacttagtaaggaaaatggcattgtttaaaatatttgcacatcttttagtacactgttttacatttttgtaatctattttaacactttagtagaagaaatgattctcctgtctgtttatgtattcaatctgttgtgataccacaaatcatatagtctctggaaaactcggttgcacatttatgagaggatgagagtgaaaaggcaattaatattttaagattattatgaaaatagttttgaccttgcaagaccccttgaaaggatatgagggaccttcaagattctctagaccacacttggagaacctcatttcaaaatatacattggtagaagattgtttgaattatgataatttggtgaaatattgtgcagcctttaaaaatgatgattctactaaagctgagttcattgacatggaaagatgtccataaataggatgtttaatataatcccattttgtggccgggcgtggtggctcacgcctgtaatcccagcactttgggaggccgagaaggggggatcatgaggtcaggagatcgagatcatcctggctaacacggtgaaaccccgtctctactaaagatacaaaaaaattagcggggcatggtggcgggcacctgtagtcccagctactcgggaggctgaggcaggagaatggcgtgaacccgggaggtggagcttgcagtgagtggagatcgtggactgcactccagcctgggtgacagagcgagactctgtctcaaaaaaaaaaacaaaaagaacaacaacaacaacgaatatataatcccattttgttttaaacaaaatatacaacctatacataaaaaaatgtctagaagaacgtaccaaatttttaattgtagttttggttagtgggattacaagggatcttaaattactttgttaagcttttctatatatttgcaactcctttttttttttttgagatagagtctcacttttgccgaggctgaagtgcagtggtgtatacatgactcactatagccttaacctcccaggctcaggtgatccttccttcttggcctcctgagtagctgggaccgtagtcatgtaccaccttgtccagctaatttttttaaattatttgtagagacaggatctccctatgttgcccaggctggtctccaactcctggactcaagcaactctcccgcctcaagaaattcttatatgtatgctcattatcagaaaataccacacggtaatttttctggcttacatcagcaattctcaaccaacaatgattttgcttcccagggcacatctggcaatgtatggagacatttttggttgtcacaactggggagttttactggtatctaggagaggccagggatactgtgaaaacatcctaaagggtacaggactactaccccccaacagagaattttctggcctaaaatttcagtagtaccaagattgggaaatcctggcttacagaaaacaaaccttgctctgttcttctcatgcccccaccccttcttatttgcacctagccttaataaattcaccattaggtgtttctgagggaacataatgttctggaaatcaccagtattggaattatagatctaaatcaaagacagaggtttagaagagaaaccaagaaatagccaagtagtgagtatgggggaacattaccaagacacttaaaaggctacatgggatttagttttagcagggaaaggttcaaagtttttcctccagcaaatgattatttccctgttttcccaagatagagtgctgttgtctctctcaaaggctataaattaattcacagcatttgaaagaacatccattcacggctttttaaagaatatctttatttaccaaatgttctcctgtgggtggttgccaaggctactgccataatgaaggtggggctgctgttattcatgtttccttgtattatgaggggggcggaaagaacacccattatatttcattgaaatcagcttattgtgtggatccaggatttcacgcccagctgaataaatcagaatgttttccttaggcatttgttaacttaaaaagacatcctttataatttttacttgctcttgaccaaagcataactaaatgcaaattttttgtttttgtttttccaccaataaccaagaagatgtttttatatttaatggaaaagtggctcactatacatgtagttcactgtaagttatgtgttgcttgtgccttattgactgttctttaattgtttttgtttgcttgtttttagagaagcttccgataatcttgcagtgcaaaatctgaaggggtcattttctaatgcttcaggtataattactaattataatctgaacataatgatgcttatatgtttgctctaagcacttattactgtagctaactgcttgtgacactggaaatctatttttaaaataacatatacgcaataaattgtaccacatgggatgcatccctatgctttgaaatccacatcctagaaaaggataaaacaactggaatttagctgactcttctactctatctcttatttttacaagtgatttaatcttccttttactcaatttattgtacaagtgaaatgtgtataattttcctggagattttcctcatacagaggattgaaggaagtattttgaaatcccttgaagaaggacactatacacattttgttttcgtgaaagccaagagggcacagtggtgatagttatgcctttgctttcatcacctctagcaaccttacttcttttttaaagaagtgttccaattaaggccatgagaagacatatttggcttttaacagaattgagtctttcccattctcttctgttagcactaactttgtgttgccatcagatttccaattcttgcaggaatttaaagaagtatgcaggtttggtgatattcagcttgattttcttaggcccctgaggttttgatgactcctgttgcctccctgccccttccaccaccccccaacccctgcctgaggagagaagcatcaaaactgctgggtgttggggttctgggctcctcacctatccggtgcagatggttgtagggatagaaaacacagcccagtcgtgatctagcccttagaatcacgacaggatgtctactaataaactctgccatctctctgtagtatgttgtagaaagtgggaccagataaggccataaattctgaaactctcttggtctcaggtttgtttgaaatccatggagcaacagtggttcccattgtgagtgtgctagccccggagaagctgtcagccagcactaggaggcgctatgaaactcaggtacactgggtcagggtttctttggctttctaatatgagttacagaagagaaaaacaacaacaggaaaggaaaataagataaacatggaatttcttggaaatattttttccaagaaaaaaatttttcttccaacttgcctaactgggtggcttctggctccaggattcccatctgtccttcagagaggggccattgtgcactgtgggcacctcaaggcagctgttgtcagagtgactgcatctaaatgaaaactatctaatctggctctaaaggtagttgaggtttgtttgtgctctaaatagcaaagtagaagaggccgatgacaagacttaaggcaggcttctcattccatacatggtttcggcatttgctatatgcctactggtgtgctaagggctgtgtaaaatgtagaaaacattaacatggccccagtcctcaaaagagtttataacttagaagcatatgcattatatagagaataataaaagcaaataaatataggccaggtgcggtggcttatgcctgtaatcccagcactttgggaggccgaggagggcggatcacttgaggtcaggagttcgagaccaccctggccaacatggtgaaaccctgtctctactaaaaatacaaaaattagccaagcgtggtggcaaacgcctgtaatcccagccactcgggaggctgagacaggagaattgcttgaactggggaggcagagattgcagtgagccaagatcatggcactacactacagcctgggcaacagagcaagactttgtctcaaaataaaataactacagtagaacactgagttaaatttatagaatatgaatgttagagtatgctgtggacatatgcaaaagagtgagtgttaaaagagagcagtcaattttagaaatgtaatcagactgaaatacaaaaatcaggtactttatttttgtaagctcttctagctgtttctcaggatttgggtggaaacctatttttcccgtcttcctactgccttcatcacctaccaagtttcagttctcacaccatgtcctcattgctgccacctctccctttttcccaatttagcttcatactatcatctctctgtctctgtgtgcactgtttcactgcgctacgcctttataaggaatcatttcaaaattatgaagagataattgacaaggattattaaacaaatggtcaagataagttataaaaacctcatttcccctgagatcatattgctagacacccctttctgagtggattaagagcaaatcttcttttttttttttgagacagagtctcactctgtcacccaggctggagtgcagtggtgcaacatcagctcaccacaacctctgcctcccatgttcaagcgattctcctgcctcagcctcccgaatagctagtattataagcgccggccaccatgccctgctaatttttctattttcagtagagacggggtttcaccatgttggccaagctggtctcaaactcctgacctcaggtgatcccccagccttggcctcccaaagtgctgggattacgggcatgagccatcgtacccagccaagggcaaacctttagacaccatttggaatcctttctaggctttggtatgtaaccctgtgattgtatcctgggataggaaataagatggcaagaaagatggcttggtttaacatgttctgaattccattttcttactatttaggtacaaactcgacttcagacctcccttgccaacttacatcagaaaagcagtgaaattgaaattctggctgtaagtggctttctttagtattttgaaggtggcttctgtccatactgtcaaagtagttgcctcagggttcagagcttttttgctcagtgtcagcagaatttggatgcaggccttattgtgatgtgaactacacgcaatttaaaactattaagaactagggggagaatttaaggttttttgtttctcctctttgttcctctttaagatagaggaaaatgaaaacaaaagtcattttcctacatatatcaggcctttgccttgctaagcttacaccgaatacatgtagcagcgtcagacctttcgggtgtggtgtagagggacagggagtacagtttccactgcttattaattctccagggctaagatcttatcactgcacagttcattaagcccttttacagcacaatagcatctcagactctgcaaaccctattcatactgctgcatttcacgtgacactatggtcacaaggcagtattgtgctgctgagagttgatgtacatttgtgtgtattcacaggtggatctacccaaagaaacaatattacagtttttatcattagaggtaagcaatatgaactcttctgcactgtggcctttaagatcccaaatctttgctattagtttgccaaaatactgaagacggcattcattagtgatagtatttttctggcagctgcaggaatttagtaacatttttccttttatgtaacatatatgttcctaaatcctatgttgaaggactcatacttttctagtgactttatttttcagatacttattttattaaaaacaaaaaacaaaaacaaaaaaacacatatactgcttttactatgtgtcagggtctggcaggccttgttgtaagcattttacaagtagtaactcatttaatcattaccaccccaaaatgtagatactgttattatccctttacagagtacggaagtagagaggttaaatatcttacccacagtcacccagctagtaagtagtagaaccaggatttgaacctaagcagactagcagaatcggtgttcttaaccactatactatactatctctcaaacctccattccagctagggaagctcatttgcagattagtactatacaaaacaaaatccttttgtaaaaattaattaggtcctttataaatatatatatatttttacaggtacatccctttatcatcaaatagcctaaataagaactttaaaaatttgaatagttatctttgctattaagaacactcaactatagtcatagctacaggtgacttttgcaacatgtcatatcaaagaatacttttttgtctatccagagtgtttagtcacaaattaaattagattaatagtgaacttagccctagaactagtattttatatatcattttttgttctcttacaaataagcatataccactatctcactggcagtgtactgatttatgatccagtcaaatggatatacttaagagctgctatcaccgttgtacaaaaagtaaacagaggccgggtgcagtggctcacgcctgtaatcccagcactttgggaggccgacgtgggtggatcacctgaggtctggggtttgagaccagcctggccaacatggtgaaaccccatctctactaaaaatacaaaaaattagccgggcgtagtggcaggcgcctgtaatcccagctacttgggaggctgaggcagaagaattacttgaacccaggaggtggaggttgcagtgagccgagattgtgccactgcactccagcctgggcaacaagaccgaaactccatctcaaaaaaaaaaaaaaaaaaagtaaacggtaggcagaaataactgctctaaagtcacatcagcacactagggctgcagcattgttaatcaggctctaattagggagtcttgttttaaggaaaactggtgcttcagaggaaccccagcagtctcctaactggttctgctatctccctattactgattctcctggtatacttgaagagggaaatgacactggaatttcattagtgacccagaaaaaaccagctagtaaaccctagagacctgttgttaagtcttatctatttttttcctagtgggatgctgatgaacaggcatttaacacaactgtgaagcagctgctgtcacgcctgccaaagcaaagatacctcaaattagtctgtgatgaaatttataacatcaaagtagaaaaaaagtaagttatcacttgggcatagcagggttcacatggttaaaattcagggcggggggtttcagagtgacattattttgttgtcttgttgaggtttgacgcctggtaagctgttcttagaattgcagctgacaaccaataaatcttgcttggactgtgaatcacagtcatgatctcatcaataacaaaacacaggggtcctaggagtagctgtcccaattacaattttgttcacccaggtaattcactttctaagtatgtttaaatcaaagaaaataaccatgactactttgctgtatgtccttatgtcataatgccaatcaatcaatcaatcattcatgttatcatacacttaaaaggcaacaaggaagcctatgaggtgaatggttatctccttactaggaccttatactgcagacccctgtcagtcacaccttgtataaaacctatataattttttaatgactagccttccatcttgtttttgcttaaataaagctcctacaggtgttataaaaatttattagctctgttcttcactcattaaactgagtctgtccttatatcttttcttttcttttgcagggtgtctgtgctatttctgtacagctatagagatgactactacagaatcttattttaaccctaaagaactgtcgttaacctcattcaaacagacagaggcttatactggaataatggaatgttgtacattcatcataatttaaaattaaattctaagaagaggctgggtgcagtggctcacacctttaatcccagcactttgggaagccaaggcaggaagactgcttgaaaccaggagtttgagaccagcctgagcaacaaagcaagaccccatctctataaaaactaaaaaaattagttgggcatggtggcacatgcctgtagtcccagctactccagaggctgagatggatcatctgagcctcaggaggttgaggctgcagtgagctgtgactgcgccactgcactccagtctgggacaacagagcaagaccctgtcttaaaaaaaaaaagaaaaaaaaaatttttttctaagaagctgtcctacaaagttgagctttgttagtttttcatgtgtaatatattataaatttatcttttgggatataataaatgctttcatatacctgctgctttttaattgtaaatctattaacactaaaggttttagggagctggaacataaggtaaatagccttttcttcccttggctgtaatgactaagcacatgaaaatatccaaaccaaagggcataaagaaaccaaaaatcataattactttggaacctttattcttgatgactttgtagtatgtttctcctaaggtggttaaacaaactctcatttgactgtgagaactcatcgaaactggggaaccatgatgataaaattatacagccaggtgggaagcagctcatgagataacatgactttttataaaactgtcaggtttcaattctaataacctagaagatattatagagctaaagcctattcattaatcacatcattctagatttagtagttattgccagaactattaaaatgggttgggaaaggaataaagagacagtgctgataaacagacatgtttaatgatagcttgctcttcacagagatgtctacagagacttttaatctataatccaggagtatataaccatgcagcacagaccaattagccaaatgcaaaataaactagattcttaccacaactatcctataaa

SEQ ID NO: 6 - DNA, 40945 bp, Homo sapiens
actcggcctggagctgtgttttgtcggtgaaggattttccacccatgaaggggtcagacgtgaagtgtgtggccctgggcagctcctctgagcccagagacgccagccctagccgccttgctgtgccactttgggacttccctccctagcctgagcttcagttttcctgcctgttaggcagccccatgtcaactgcacttagtaggccgggtttgatgcccgacaagacgtgaagtggtggaggtgggcaggatcccagcgctaccatcttcttgaaccagtgatctcaacacatcggatttctgtttcctcatctgcaaaatgggatcagtgagctcaggtgggtcacaaattctacaggaactactttagccaagaccggccccctgaaagttcccctcggtgggctgttagggtgattgttttcatctgtggggctccctgatgcgtcccacccaccagccttggagagggtgggatgggagggtggggtgcttggggagacaagcctagagcctgggccctcccaccccactgcctccccccatcccagggccccccacccagtgacaaagcccgtggcacttcctctacccggttggcaggcggcctggcccagccccttctctaaggaagcgcatttcctgcctccctgggccggccgggctggatgagccaggagctccctgctgccggtcataccacagccttcatctgcgccctggggccaggactgctgctgtcactgccatccattggagcccagcaccccctccccgcccatccttcggacagcaactccagcccagccccgcgtccctgtgtccacttctcctgacccctcggccgccaccccagaaggctggagcagggacgccgtcgctccggccgcctgctcccctcgggtccccgtgcgagcccacgccggccccggtgcccgcccgcagccctgccactggacacaggataaggcccagcgcacaggcccccacgtggacagcatggaccgcggcacgctccctctggctgttgccctgctgctggccagctgcagcctcagccccacaagtaggtgtccagggacccagggtggggagactcggcctccggtgcacggaccaggccccaagtattcccggcctccttcctgtatcctgagctcacgcccagcagagccatccttggggctctggagggtcaccaaccctcccagtttgctggaactaaatggttatgcaggactttcagtgttgaaagaaagcctcgggcaaactgggctgactctttcactttaaccctggtctctggcgtctgctcacccagctgcgttccattactccccgggaagcctaggtcccagaatgctgtgcagcgacgggagagtttcctggcctctctgggccttgagtttccccatgaggaatggatgggaaggagggcccacagcctgggctctgagcaccgtctctgggttcaaatctcacataggcacttccttgtggtgtgatcctgggggactgccttcgggcctctgagcgaagtggggaagagaacagacttccctctcagagctgctgaggaggtgggtggtgagggatcattgcagagagggctctggcagactggccacttctgtgttgttttatttttagctttaagttcctccagctcaccttccccagggcctttgggcagctcctcaaaccctttgaacaggccaaggctgcagggccctgccctgcctccctcctacctccctgatccccagaaagggtgcaggagtgggtgcaggccaggttaggggttctgtggggctccttggcctgggggctcttccaaggggtcatggcctctgctgctttctgaaactgaccagaggaggggcggtgaggagcaagggacccccagccccatgtcccactccctatccctcggccacctcaagccgctggccggtcctgtggacatcctttgacccacctgtgcatccaggggcttcctgacagatttgggggaagaggggcagaaatgagctgagagtgtggggaggaaggggaaggaaaacagcggtggggcagccaacttctccccacctccccacctgatggcattttagagtccctgattctgggtctctaaagctctgcccaccacctgattgacaggaaactgagtctcagacatattaagtgacttagcagggatttgactcccggcctgcggctccctaaatgtttgctcctagtaaggtgtgatagggcgaaccctcttaatgcggctcacaacgaccctgcaagatggctgccatcatcatccccattttacagaagagaaaagggaggctctaacctgccaagttcacatggctaagacggagcccctacctgagctccaagatctccctctctcgtatttgtcgctgcagtaacactctcttcctcttggtcgttagagaaaggtccatgcagacatttagggcctggttttaaaggatcaaaggcagtgatatgctgctgaataattaacaacggggtggggagctcaatttgtagcgtttgtggattttcacagcgtaagtactcccacccggctgacttcaagccaccaactcaccaagtttggagctgggaatcagtgcccggtagcacctggcggttggttctccagagtctctgcaggcgcagatcacaccgagagcagagatgacagtcaggggtgtaaaacgattagaaagaaatgagtttggacattcatgaccttttaaaaatatatagtaatagctatgtaacagccagttggaaaaactcctggaaacgtatccgtctgttcctgtgagcaggtaggagctggtcccagtgcaccaggagtcacaggctcaaaggtacaacagaccatcaacccaactcatttatggtctgggaagctgaggcccatggaaggcagaggggagcctggggccagggcctggaagccagctgggggtaggggtcggagtgaccctgacctcctagaaatgggtctagaatttgggggcaccacttgtaagaatctcctaaaactgtaccttgcatgtgacttgataccctcacaaatcagccttcagtagtcagccttctaaagttattcgtccaactctgtaaagatgcgtggtccgtgggtacctgtaacaaaaacccgataactggaaatcatctaagtgtccatgagcaaagactgttaataaattaccacacgacggaatgtcatgcagcaggcaccaagaaggcagagtcatatgaacactgccatggacggatgtcagggacacactgttaggtgcccaaacaacaataattccattttggcaacaataaaatagtaataatgtacaatatgcacagagaaaattctggaatagagttttctatttaacccactattactgttctctggtctggggttttctctgtgggactttcactttcttttttaaatttttttgagacagtcttgctcttgtcacccaggctgcagtgcaatggcacaatctaggctcgctgcaacctccgtctcccgggttcaagcagttctcctgcctcatcctctcgagtagctgggactacaggcgccggccccacacccgcctaatttttgtatttttagtagagacggggtttcaccatgttggccaggctggcctcgaactcttgacctcgtgatacgcctgcctcagcctcccaaagtgctgggattacaggtgtgagccaccatgcctggctgggactttgactttctcagacacactttcctgtcatgttgggtttttttgttttcttttgttttagggacaagcaggccgggtgcagtggctcacgcctctaatcccagcactttgggagggaggctgaggcgggtggatcacctgaggtcaggagttcatgaccagcctgaccaacatggcaaaaccttgtctctactaaaaatacaaaaattagccaggcgtagtggtgggcgcctgtaatcccagctacttgggaggctgaggcaggagaatcgcttgaccctgggaggtggaggttgtgatgagccgagatcaagccaccgcactccagcctaggtgacagagcaacactttgtatcaaaaaagaaaaaaaaagaacaagcatgtagagatttttttaaagcaattaaaattaaccatatagctgcctcagcttgcccctcaaaaaaaatagagaaaagggaaaaaatcacctcggaactcctttattgatacaggtaccgttagtatggtggtagatggcttactagtttttttttctaactttttaagctacttttaatccagatgggtccacattttgggagtcttttgtctatttctttcgaaccaggtctccatgttgtcctgtggactccatgaccatcctcttgcacttctggaatattctgtcccatcaacttgtcaccgtttgcttattgttaaatatttaggtggtttcccctttgttctagttataaatactaccacaatgcacagttttggtacgtgcaccttttcctgtattttggattatttcatgtggattgcgtcccggcagcaaggctgcagcggctcgtggcctgtgctgggtggctgggattgaagagtgttcctgagtgtggaggatcctttgctggaggacttaaagtccccatgctgctggctgtctgtgttggagtctgggacttgctggagaagggtcagtggcgcaagagcgagaccacaaacacctgtctcttagaggctgcgttcccatttgctaggaggaaaaagagcctggagcaggagccgtgtgaaccaggagagggtgggctccccgagacacgggggacgtgaccattagcattctccctcaccccagccagacagacgtgacccagagggacagagggacttgcttgtggtcacggatgtgttggtgctgggccctcgggcgacagacccattcttttgccccagggctggaggtggatctgggcaagagtgaggcggccacctctcctctgtccccagcatgtcaggcataatgccagctcctccttgcctctatccccagtttatagatgagaaaattgaggcttgggacaaatgacaggtccagatttcaactccaggccgtctgcttccaaattcagcttcttttccccacaacttttgtgacctgaatgctggagacctaaagaactgtttacccttggctctgggaccctgcttcctagttccagcccaggctttggggcaccagccttggaggctgaagggaccctcagccagggttcagctggcttcaacccctgtggcaggagtgggggtgggataaagagataatataacaactgacatttattcagcacttacagtatgctagacgctgctctaagcgtggtatgtgtactgtcagacttaacgcttgcaaaagccctacaaaggagatactctttctgcccccatttgacagatggggagactgaggtactcgtataactcagtcaggtgaagaaatttacccaagtaacactgccctgaaatgagccactggggctcaagccctgggcctaagcactgcagtgtgctgccacagtggagaggatggggatcttcctcttgcctgatcttctccccgcaggcactcagccttttctctggtccccataacggccctcccatccggggtacaacccctgggaccctgcctttaccttcagcagccccatctatgccctgctctgtcttcctcctgccttcatccttaggtgaaatctcagactgtcagacccctagtagaacttagaatatgtcctatccacccccgctcttccccacccactagccatagggaaacagagtcccagaatggtggggggacttgatgtgggtcacccagcaggtcagaggcagccctgaccagccagttccacaaatggatgtttgtggtgttagaaacaaaatgcttgttcctcagtgccgcaaagaaatagcacttgaacataaatttaatcttctcagcaaggcaatttttacttctacagaagggtgcgattcaagaatggagtaatggcgagagcacatctgaacaagggaggggaaggggttcttactcctgacgcaggtagcccctactgctacgtcgttcccctacgggctagtgttggaccgcacagtctaagctaattccagttagctattttagagagagcaggggtatgagccagagtggcggggtgagtagtttggcgggaaggatggttaggaacaggtaactaaaggtgacttaggtcaaagcaggtgaccaggggtttgtgaggtcaaagcacatgaccaggatgagtcaggatggagcaggtgaccaggggaacagatgtgaactactgattaaaactggtggaaaaggttgtttactgaaaccatgaggaagttaaactttaaaatggaggacaaagaactgaacatactgacatactgattctttgaagagaaatctagaactcactgtatccagtggaagtggatgtttgctctgagccctggactaactgattgggacatggaatgctgtggactctccttgtcctggaaaaactcactgtctgctgggagtgcagacacactgacaaatcaaaacagcacacctgggcatgtatggtctggttctccaaggacacccaaggacggatgcacctaagaaaggagggactggcttcagtgagattttcaggacagggttttgaaggatgaatagaagtttgctaggggctgggcatggtggctcatgcctgtaatcccaacgttttgggaggctaaggtgggaggatcacttgcggccaggcattcaagaccagcctgggcaacatagcaagactctttctccacaaatatttttaaaatttagttgggcataatgactcatacctgtagctgctcgggaggctgaggcagaggattgcttgaggccaggaggtggaggttgcagtgagctatgattgcaccactgcactccagcctgggaaacagagcaagaccccgactctccaaaattaaaaaaaaaaggccaggtggtcaaacaaaggatgagtgttggtctgggaaagggcatggcagaggcaggagcgaggtgtgtttaggggaagagcccacatatccccactgactgggcataaataattgtgatagtagtcaccagttcctgagcaacccccacttagcaggagccggcctagcgctgtgcaggtgtaatttactggcctgcttgccgactccatgggaagctgttatgatgaccctcatccccatgttacagatgagaacactgaggatggaaaggcagctggcaggtggaagaatcaggacctgaacctttggcatctgtcaaatcgctgtgcttttcacctctactgtaggctgcagtgcaggaacttgaccctgcaggcatcgtagaaccaggggggagcccggggccaaggcatgctgagacctcctggtggctgggggcagtggctgggctggatgctgggaaacctgtgaggctgtaattgggcctgaaaagggtaaagagtggcccgggggtactgaacaagacggggcaggcattgcagcaagaaggacccttgttgaaacgtatcttccttgggaggctgagatgggtggattgcttgagcccaggagtttgagaccagcctgcgcaatacggcgaaaccccgtctctacaaaaaatacaaaaattagctgagtgtggtggtccacttgtagttactcaggaggctgaggcatgagaatcgcttgaacctgggacggggaggttatagtgagccgagatcgagacactgtactctggcctgggtgacagagtgagactctatctcagaaaagaaaagggggggtggcagcgggaagaaaagtatctgtcctagtatgatgaaataatattcacagcttctgtgtctggggcacctacttagtaccaggcactcaacaggggttaccccatcaaactgacacactcagcctgtgaatgcctgctgcttgctggagccagactgtctgggtttaaatccaggccgtgacacttagtagctgggtcacctcgggcagctggtcttcagtttctttaaccgccctggtcttcagtttcctggagtgtgcatgggtgtaatagcgccgcccacctcacaaggctgctgtgaggatcaaatgagttcactcgtgtaaagctgcctaggctcccagtaagcatgatgggagcatctgcagtgattattggtggtctgcaaatggggaaactgaggctcagagaggttaggcttctgctcaaggtgaccagcattttaagaggcagagctgggatttgatccaggccatctggctccagagctgtttttcttgatcatcctccaaggtgctgaaggtagccctctggaaatctgggaggtgctgtgtgcacatgggtggcgagggtggagaggggacagtggtgggaggtggcttctgggtctctcacttggggttccagtcacccaggcccccagcggctcctcctctgacccagtcccgggaggccctggcgtttcccttggtgccaggggattgttttcaacttggtctgggcccgcctcaggctccgggagacaggcccaggcgtcacactccctcctgtctccccattctcgtctgcggggtgggggcggccaggattcgaaaaggccccaaaataaatggacctcttatctgatctccccgccaggcctgttatctgatcattacataatggccaggcttgtggcctctcccgctggctgacggcatggaggaggcggccccaggcggccccagcaatccgggaggaactggggttcctggaagtctggggagggggcagggaaagtcccaaagggaaggagggaggcgctgcgataatctgcaggccagacactgggtcatgttgggagacgcgggtccgaggcccggcctggtcaaccatgtgctgtgagactttgacctgtcccgtccctccagacctcagtctccccatctgagtaggaggggcttaagctaggtaacagccaaggaacctgcgctcaccgatgaggaaaggagagggtggggagaacatgggggctggtgggtcagagggactggagacaggagatggcaccagcccttgattttgttggggtgagggagatcccagtgacctctccatcccagaggaccgtcacctggaggccaccccatcccgccacttcaccccaccccttagaacagtcaattctacagtgactgaagtcagtcaaataattgtaattaagagaaagctgccggccaggcatgctggctcactcatggtggctcacacctgtaatcctagcactttgggaggctgaggcgggaggactgcttgagctcaggagtttgagaccagcctgagcaacatagtgagacccagtctctactgaaaatttaaaaaattagccaggcgtggtggcgcacaactgtagtcccaactacttgggaggctgaggcaggaggatcgcttgaacccagcagctcaaggctgcagtgagctgttatcacaccactgcactccagcccaggagacagagggcaaccttgtctgaaaaataaacaaatagaaatttaagaaagaattgccatgtgcccagtctcatggagtcctcccagccacctctgtggatcatgtgggctctgttgtcattttatagaccaggtattgaagccccaagaggtgaaatcattcaccagagccacatagctggtaagcattgggcctgagaggcaaaccaggtcagcctggctccagggagcttgcttttaaccaaaatgccactatgtccaggcactccagagtccctgggacatgtaggatagggtcagagagacgacatataaggcctgggcccccgtggcagccagaagtcctcatccagatcttctccttcccaagacagagctgggaatggcgttgccatggcaaggggtgaccatctcacttcctttgctgacttctggggcccagagcccaacgtgctgtgggaaggtgaggaaggaggccggtgaggctccagacagcccagggttcagaagaagcctccctgccccctcctctgagccggccttggctggacatgaagccagtctctccgcgcccatctttgatctccaagaaaacaggaagtgagcgcgacaagatggagacacaaacttccaaacagtctccccttctgtcctccttccctcctccggagcccccttcccccggcacattcctcaggacgaggtgtaggagcctcatttccttttccgaccctgctgggtcagggtgaaattccattcctttccctcaggacctgtgtttccgggctctgcggtctgctctggcagcctccaaacctgggccgccttctcggctcgccctgtcccttggggctagggaactctcaaccccttcagaccattcctcccaccaccttgaggcaagagaggggaagctttgtctcctgagctcagctcctgccttacctggagggagacttgggttcacacctaggccctgccatgaagttagggttgccagatacatcaaatgaaaatcagccgggtgtggtggctcatgcctgtaatcccaacactttgggaggccgaggtgggaggatctcttgagtccaggagttcaataccagcttgagcaacatggtgaaacctcatctctataaaaatgcaaaaattagctggatgtggtggtgcatgcctatagttccagctactcaggaggccgaggtgggaggatcacttgagcctgggaggttgaggctgaggctgcagtgagctatgattttgccactgcactccagcctgagcaacagagcagagtctgtctcaaaaaaataaaaaataggccaggcgcagtggctcatgcctgtaatcctagcactttgggaggccaaggcaggcggatcacctgaggttgggagttcaagacgagcctgaccaacatggagaagccccatctttactaaaaatacaaaaaattagccaggcatggtggtgcatgcctgtaatcctagctgctcgggaggctgaggcaggagaatcacttgaacccaggaggcagaggttgcagtaagtcgagatcacactgttgcactccagcctgggcaacaagagcaaaactccgtctcaaaaaaataaaataaaataaataataaaaaataatttttaaaaataaataaaaaataaaaatataggaggctggccgggcacggtggctcacgcctgtaatcccagcactttgggaggccgaagtgggcagatcacctgaggccaggagttcgagaccaacctgagcaacatggagaaaccccatcgctactaaaaatacaaaattagctgggtgtggtggtgcatgcctataatcccagctacttgggaggctgaggcaggagaatcatttgaacccaggaggcggaggttgcggtgagccaagatcacaccattgcactccagcctgggcaagaagagcaaaactccatctcaaaaaaaaaaaaaaaaaaaaaaaaaaaaaaaaatatatatatatatatatatgtatgtggatgtgtgggtgtatatatgtatatctatatatgtatatatgtatgtatatatgtagatctatgtatatgtgtgtgtatgtatatatacacacacacatatatacatggggcccagtgaaatccgaatttcagataaacaatgaaaatttagtataagtacgttccatgcaatatttgcaatatactaatacttaaaaaaatgcactcattgtttatctgaaatttaaatttagctgggtgtccttctattcatcgaccctatacgtagtagcgctgtgaccttgggcaggagacgtttcctctcctagccttggttttttttaatccatggaacgaatataatgatatccacctcataaggtggctgtgatgatgcaggaaagccgttagctcatgtcaagtccctaggagacgtttggaaagtaggagtcattgtcatcaccttattctcacctggcctctttccggatgtttctccaacaggtcttgcagaaacagtccattgtgaccttcagcctgtgggccccgagaggggcgaggtgacatataccactagccaggtctcgaagggctgcgtggctcaggcccccaatgccatccttgaagtccatgtcctcttcctggagttcccaacggtgagtgtcccatggcagggtcgggtgggggctcagaggaagctccaaggcagatggggtgaggggtgccttccttgtggctgtccctggggcagtggctgagtcctcgttaggccccctgccaagagagtgatgtgggcatctcacagggcccataagaggtggcatttctaggggcagggtctggatcagggcagtcttttgggtgccaccagaagactcaggtgggaagagctgagtagagaagagccagatgggtgggggggaccaggtgagtgttgcttatgcacctccaatgatggagacctcacagaatctcagaagaatgcagctcctctctagggagcttggactttgaaaagtgcttcttgggccagccacagtggctcacgcctgtaattccagcactttaggaggccgaggcgggtagatcacgaggtcaggagatcgagaccattctggccaacatggtgaaaccccatctctactaaaaatacaaaaattagttgggcgtggtggtgagcgcctgtaatcccagctacttgggaggctgaggcaggagaattgcttgaaccagtgagttggaggttgcagtgagcttgagattgtgccactgcactctggcctggtgacagagtgagactctgtctcaaaaaaataaaaaataaaaaaataaaaataaaataaaaatacaaaaattagctaggcatagtggcgcatgcctgtaatcccagctgtacttgggaggctgaggcaggagaatcgcttgaacccaggaggtggaggttgcagtgagccaacattgcaccactgcactccagcctgggtgacagagtgagaccctgtctcaaaaaaaaaaaaaaaaaaagaaaagaaaaagagaagtgcttttcagttgagcccagatctttctccctggaatgtcccctgctgaatatctgtgaccctcagagatccaaaggctgctgccggcctggagacgattctccccaggagacccccactcccagcccaccatcagtttgtctgatacgtctgtcctgaataataacaacacctttgttaagcgctatgtgctagagactgtgctagggccgactctatgccaggaattaagcatctcacatgtattaagcctcccaaggctcatctgccagggtctgttattatccccacttcttggagaaggaaactgaggctggctgagagcgatggagtgacgtgcccagggccagagttcacaccagatccctggggatgccagagccagcctgccacttggttccccacgtggatctcagtgttcaggtggcttctggcctgttggactggagattacacctggttgatgtggcctttggtcccgatactgacttcgccgtgtcagctccgggtaaacttatggccaatctgcccccaaaactgttaagttgccttgcgtttgtgcagtgataagaaagtgctcagaccaccaatatcgggggaccctgctccccaccgccctgccctctacgaggactgtgggctttgataatttccaaatcatagatagtgccaaacacactttgtgtggtttccataggcattgtcatttttttttttcaaatttggtaatgatattcaaaatacgactgcctctgttagttcgcattgtttgttttaatgttcaggtccctgtgcctcctctgggtgactgggatcccccaaccctaattgctcaatactgggccagggtgagaggagggcccctaggcaggtgtctaggtctatgggagataggtgtgtagatagccagccaggatccaggggactggtgcattctcacggggcacagggccagggcactccagctgctacgggattaggcatggcttgttacggccacaccatcctgaacacatccgacctcatctgatcttggaagctaaggagacttgggcctggaggaagaaacatcatggatgtccaggagctcaccaaggaaggaggtggtgtggaagagcacagaatagagtgaatgcggaggcagagggaacaggctctggggtcatcaggtggcaggagctagaggttccccagcaggacaggggagatggcaaaggcctgtcgccatattaagaagtttgatctttatcccgtgggcaataacagttcttggagggattttaggggcatggcagggggccactgtaactcatgccatattccaaggatccttgagttcatgacaacaaaatctccctgttagcctctgcctcttctagagaactcgctccagggagcttccaacttttaattcaaggagccaggctgcaggctccagggctttgagggatgttcatttgaggaggtggtagagacatctggggtccaggaaacccagggttcagtcctggatctgtccctggccagcacctcgcatagcatctggtgtgcagagggtggtccttctccccacttgctggtagacacacctttctcggactcaggagctcacctgagaacacagagtagcagaacctggcccaggggcctggcttacaccaaatcactctgtttgtttgttttttgttgtttttgtttgtttgttttttgcctcagactcctgtagctgggattacaggcgtctgccaccatgcccagctaatttttgtatttttagtagagacagggtttcaccatgttggagaggctagttttgaactcctgacctcaaataatccgcccacctcggcctcccaaagtgctgggattacaggcatgagccactgcgtctggccccaagtaactcttgaacgtgtgagtgaatgcacgcatgcgtgcacaaatgtgtgcgccgctgtatgaccttgatgcaggggttgagaacacaggttctggagccaggcagccctccagctgaactgtggctccgcctctgagagccacatcgccttgggccacctccgagctttgattttcccacgggaaacctggacccattagcagcacctacctcacaggtgtgttgtaagaatccagcaggacggtgcaagcaaaacaccaagcgcaggacctgcctggagtgacggctcagcgtatggtggctacggttattgttattattatttctctctgggttccatttctcctctgtgaacatccccattttgccagggttgttaccgtttacagaatgtcttcgtatcagttgaataatttgaacctcaatggttattgctacaagatcaatggggcaggtcaggcgcagtggctcacacctgtaatcccagcactttgcgaggctgaggcaggcagatcacttgaggtcaggagttcgagactagcctggccaacatggcgaaaccgcatctctactaaaaatacaaaaattagccaggcgtggtggcaggtgcctgtaatcccagctattagagaggctgaggcaagagaatcgtttgaacccgggaggtggagattgcagtgagccgagttcgcaccactgcactccagcctgagcgacagagcaagaccctgtctcaaaaacaaaacaacaacaaaaaaaagattaatggggcagggctgtgaattcattttcagcagggcaagctgaggtccagcctcatggagctgggccttcctcctcctgctgcttcttgtctccctgctctgagggttgagcccatgatgctgccagcccctactgctgtgaccactgaggaccctgtggtttccctgggaggcaccttcctccccaggcatcccctaagagtggggtctagagctcatagtccccattgcgcagccctcaccaggtgccactctgtgcccagcctgtgttgatgatgcagacagaaggtagagccagggaggcagaggtggcatcagcagccctggtatgagtggtgggatcagcaaatggggcttcagggggccgcaggtgatggggtgatgagcactgaaggtagaggagggaggggcgttagggaaaaggcccctggtgtctagcccaagagcagggtagagggcattccaggcagaagccagtgcacagcaaaggcctagcggcatggggctggacgtggtagtgggggtggtggcttttagcagccagccggatccctcctgacctatggccggcttcttcgatctctggcacagagaagtggctttcccgtccatccctcagaatcctcagatttcctgtgggtgggtggtagatgggcggtggcagccgagagccttggggaagtgccgctcagtgcgtgtgctgggcaggtctgcagacagccccgctgggcaggggctggatctcgctgggtccctgaagggcaggccggagcctggattccgggagggggcccagggtcacatcctgaccctcggagacaggaaaccagcctggtgtctcagcaattcccgtcaggctgactgggccgatctgctatcctcctaacaaatgcacaggctgccaggccagggcagagctgggtcagcactgattcacccactcctgggcaaacttggggcagctgagaccccacccacccctgaacagacacagcctgtcaggccccagcactgactcactcttgaccagaggggcaggcaacaccactcaggcagagagagagagccgggagggaccttagctcccccagactgtcctgggaggcagtgggaggccatggaaggcagtacagccctcagacttgggcaaaggggacccctgcctgggcttgggggaagcagtctccctctggccctctgccaatggcagccctctcccagggtggggactctgtggggccaaagggatgtacccccctgaaacctgcacccctcccttctagatgatgctctgggtacccaggaccccaaaatcccaaatggctctgagcctcctctcagggctgcagggatctttcctgttccatcctccaggggagcactgcatggctatgtgagctcccccagacctgaaggatggttgagttggctacttggggaggcaggcatggtggagtttgggtatccgggctgagctgtccacatgtggacacatgagcacccttgctggctgtcagaaccacagtgatgagaaggagaaagcactggggccagaggctgccatttgtattcttgtctcaggccttgcaaatattagaggcaggcttgctgaaggggcaggattgggggttggggagggtcagacaggctgagcagggattgtgcctgccctcttactgctgaatctttggtgttaagctcgaagtcagcccaggaatcaatatctgttggatggatggatggatggatggatggatggatggatggatgcattcatgcatggatgagaggatggatggataagggcgggagggagagagaataaaagaaaggaaggaaaaactgtacattcttataagcatttggtgattggctattcccaagtgggctgatgatgttccttgctgtttatgtctggtcgttcggaggtgttggtttgttctctgccaagctcttgaggacagagttatgccttttctgtcctttgagaacacagaagccccaggctgggcccagtgccagcctctcagacaggcaaatgagttggagaggtgaggacacgtgggctgaccaccagaaaggctggaggtaccaggggccccctcagctgaggaagaagcatatctctccagggcattctgaaaacccactctgtggccatctggctggagaccaggactcctagatgtaaaatgctgggacccccagaaggcagcctgggatctaggggccacacaattctagaacatcactgagctcaactcctccctgcacagatggggaggctgaggctcagagataggatgccacagcgaggcatggctgagagatttgtagttctcaccagctgcagcccacctctaactggacccatgcttcccagcccctaaactgtggatggctctccttggatgactgtgtgcaaggggagaatcagagggattaaaaagccaaccaggccaggcgtggtgtctcacgcctgtaatctcagcactttgggaggccgaagtgggtggatcatttgggtcaggagttcgagaccagcctggccgacatgggcgaaaccccgtctctactaaaaatacaaaaattagctgagcatggtggtgggtgcctgtagtcccagctactcaggaggctgaaccagcagaattacttgaacccaggaggcggagattgcagtgagccgagatcgtgccactgtactccagcctgagtgacagagcaagactgtgtctcaaaaaaaaagccaaactactcccacatgtttagctgggcactggacaacctactttgcaggcagaattgcactgaaacctcataagtcaatgaagtgggaataccattttccaaatcaggaaactgaggcccagagaggcatagtgactgtccaaggtcacaggctaatgactgagcccccatctgaattcaggttggtctggctttgatcctttcccctgccaccctgcctgtaggaccatctgagttttctggggtggacagagggacggctggctccaatctgaccgcctccagtcaggccctgggagggtgggggctgcaggcagccctgaggctccactcctagaagaattgctggaagcgactttctataagtggctactagcactcagggcctcctcaccgaaatccccccttcctgccaccaactgctgggcaacaatggcatctgtgggacattggtacaaaaatagaaacgcggtctcccgcccacccactcagggagggggctgggtaggcgcaggctggccgggctgggggtgaggggctggccagactgcggaattcccagggtcccatgaggaaggctgggagcttggggttgggggcaaggctggcgccatcgttttttgcctctggggcccccggccgggagagaagggggaagtcggtgtgcgtgtgagtggccgtggcggtgagtcagggccgtggggagggaaatgtttgctgtagaaaccctgactgggtttttctggtaaccagctgtttttcagcttggccctgcagctcagagaacctgagcacccagctttccagcccccctgagtttcccaactactcacttgcccccacctcctacctgccctcaagcctgcagggaaggacttggtgacaactgagtggtagctttggttcgtgagctctgggatgagagctgagtgtcccaagaaacattccgaagttccagcctcctcgtcacccctcacagacagcatgaccaggctgtgacctgcacttcccttttttttcacttcctttatccatagcccaacctggtactggttcccaaccctgtcctacccccatttcacagatgaggaaactgaggcatagaggaacagggacagtggcggagcagcagtaggactggatggccatggggctccttcatccccactcagggcttggccaccagactgcactctggcttctgcagcatgcttggcctgtgggtgtcaccatgggatggcggatggatgtcctcatgcaccacaggctgtgctgtgtcctggccatgatctgactatccagagggcccatctcttcatcgtgtgggccttgcaattctttcctccaggttgggacaagcagatggggccgcacagcaatggactgtagggcaatctgggagagaggtgcagttgagagggaggacatggtccagggaatgcaggccccgctctggcaccacgcccagcctagaaagcgtaatatttttaaaaactgccaggcatggtggctcacgcctgtaatcccagcactttgggaggccgaggtgggtggattgtttgagtctaggagttcaacaccagcctgggcaacatagtgaaaccccatctctacaaaaaatataaaaattagccaggcatactggtgtatgcctgtagtcccagctacttgggaggctaaggcgggaggatcacttgagcctgaggggcggaagttgcagtgagcaatcacgccactgtactccagcctgggcaacagagggagaccctgtcttaaaagaaaaaaattatatatatatatattttattcaaaactgatgaaacaatatattttgaaaaccaaaagttataaacccactagaaaacattaatcaaaacatgaacttatacaaacataaatttgaaacatatcttatcccataaattagcataaaataattatttaaaaataaccaacctaactgggcgcagtggctcacacctataatcccagcactttgggaggctgaggcaggcagatcacaggtcaagagattaagaccattgtggccaaaaaggtgaaaccccatctccactaaaaatacaaaaattaggctgggcgtggtggcacacgcttataatcccagcactttgggaggctgaggcgtagggatcatgaggtcaggagttcgagaccagcctggccaagatggtgaaaccccatctctactaaaaatacaaaaactagccaggcgcagtggcaggtgcctgtaatcccagttactcaggagtctgaggcaggagaattgcttgaacccaggaggtggaggttgcggtgagcagagatcgctgtactttagcctgggcaacagagcaagactccatctcaaaaaaagaaaaaattacaaaaattagttgggcatggtggcgcacacctgtagtcccagctgctcgggaggctgaggcaggagaatcgcttgaacccgggaggtggaggttgcggtgagcagagatcgctgcactctagcctaggcgacagagcaagactccatctcaaaaatatatatatacaaaaattagctgggcatggtggcgcacgcctgtagtcccagctacttgggaggctgaggcaggacaattgcttgaacccaggaggcggaggtggcagtgagccgagatcatgccattgcactccagcctggcaacagggcaagactccatctcaaaaaacaataataaatagaaaaaaactaaatggcacactaaaatgaaaaaaaaaattgtgtttacaactaattgatcacaaccagttacagattgctttgttccttctccacactcactgcttcacttgaggagcctaaaaaaaggaaacaaaatatttgtgacacattgaaaatgaaatattattatttgttctttttgtgttttaaagaggaaacttaaaagcaaagagtaattatggtatcattattgagtaacagaaatatttctgggcagatttttccagtggctgaaacactgtctctggctttgtgacgtcagttggggaaatggcaagatgattaaaagttaaatctcaaaactttccactggtgtcttcatcttgaaatagccttcccctttttcataactttgaaaagagcttttggatcatcttttagactggcagcttttgtatgagagcactgggagtctgtgtttcagcaaattacatttgtctttgtcctcctgagttggtggcagggcttctgaggcatttacctgtcttttttttttttttttttttttttgaggcggagtttcactcttgctgcccaggctagagctcaatggcgcgatcttggctcaccacaacctccgcctcctggggttcaagcgattctcctgcctcagcctcccgagtagctgggattacaggcatgcgccaccacacctggctaatttagtatttttagtagagacggggtttctccacgttggtcaggttggtcttgaactcccaacctcaggtgatcggctcacctcagcctcccaaagtgctgggattacaggcgtaagccaccacgcctggtctacctgtcttagtctcagcactcacctgttcacatgccactagttcagaaagtctttgaggtcattctttcaatagacactggcttgtagattgctgtgttctttttcttcttgggaataaggttagaaaaatgtgctagggaaggatgtgctacacaaaaatgtgtggaaaaatgtgagagcggccgggtgcagtggctcacgcctataatcctagcactttgggaggccaaggcgggtggatcacctgaggtcaggagtttgagcccatcctggccaacatggcgaaaccccatctttactaaaaatacaaaaattagctgggcatggtggcatgcacctgtagtcccagctacttgggaggctaaggcaggagaatcacttgaacccaggaggtggaggttgcagtgagccgagatcgcgccattgcattccagcctggcaacagagcaagactccatctcaaaaaataataataaatagaaaaaaactaaatggcacactaaaatgaaaaaaacaattgtgtttacaagtaattgatcacaactagttacagattgctttgttccttctccactctcattgcttcacttgacgagcctaaaaaaaagaaacagtgagctaggatcgcaccattggggtttcaccatgttgatgaggctggtctcgcactccagcctgggcaggaagagtgaaactccatctcagaaaaaaaaaaaaagtgaaaagaaaagaaaaatgtgagagcacaggcctacctgggcacgaatcccagcccctggctgacttcctgtgtcatcaaaggcaaatgacttcacctctcagggtcttggttccctcatctgtaagtgaaaataagaatagtggccgggtgcagtggctcatgcctgtaattccagcactttgggaggccgaggcgggcagatcatttgaggtcaagagtttgagaccagtctggccaacatgctgaaaccccatctctactaaaaatacaaaaattagccaggcatggtggcaatcgcctgtagtcccagctactcaggatgctgaggcaggagaattgcttgacccaggaggcagaggttgcagtgagccgaggttgtgccactgcaatccagcctgggcaacagagcaagactctgtctcaaaaaaaaaaaaaaaaaaaaaaaagaatggtagctcatgtctgtaattccagcactttgggaagccgaggtgggaggattgcttgagcctaggaggttgaggctgcagtgagccatgattgcaccactgcactctagcctggaaaagagagtaagaccctgtctcaaaaaacaaacaaagaaaagccagcctggccaacatagtgaaaccccatctctattaaaaatataaaaaattaatctggtgtggtggcacacgcctgtagtcctagctactcaggaggctgaggcaggagaattgcttgaacccaggaggcagaggttgtagtgagctgagattgtgccactgggttccagcctgggtgacagagcaagaccctgtctcaaaagaaagaaaaaaaaaaaaaaaaggccaggcagggtggttcacacctgtaatcccagcactttgggaggccgaggcaggtggatcacaaggtcagagttcgagaccagcctgaccaacatggtgaaaccccgtctctactaaaaatacaaaacttagccaggcatggtagtgggcgcctatagtcccagctactcgggaggctgaggcaggagaatgaattgaacctggtacgcgaaggttgcagtgagccaagatcgccccattgcactccagcttgggcgacagagcgagactccgcctcaaagaaaaaaaaagaaaaaaaaaaaaagccaacctggccaacatggtgaaactccatctctagtaaaaatacaaaaaattagccatgcgtcgtggtgggcacctgcagttccagctactcgggaggctgaggcaggagaattgcttgaacctgggaggcagaggttgcagtgagccgagatcacatcactgcactccagtctggacaacagagggagactctgtctctaaaaaaaaaaaaaaaaaatggtatttacgtcttaaggttgttgaaaggattaaatgagttaatgtgtaaagcacttagaacactgctgggatttaataggccctatttacgtggtaggtaggtattgctgttgttataaaaacattctaaatgtatacatcattgaacaattaaaaattttaatgcagtgggtacgtctcaagacataaatgatttcaacttcacattcttatatcaaaataatggcattataccaaaacaaccccccaggattttagtactttaaaacggtaagacaagcaggaatattgcaaactgggagagcaattgtgactgtctcatgtgggctggaagcagagctgtcactcagggactgcaggaaaggtggtggggacgatggggcaggggatcgctgcctccatgcacaggacactccctaaggcccagtacacaacaggttctcatttgatccttgatggatgaagttcaggctcatcccttttttttgtttgttttttgtttttttttttgagacggagcgtcattcttgttgcccaggctggagtgcaatagcgcaatctcagctcactgcaacctctacctcctgggttcaagagattctcctgcctcagcctcccaagtagttggaattacaggcatccaccaccaccccacctggctaattttttgtatttttagtaaagacggggtttcaccatgttggacagactagtctcgaactcctgacctcaggtgatccacctgcctcagcctcccagagtgctgggattacaggtgtgaaccaccatgcccggccttttttttttttttttttttagatggagtctcactctgttgcccaggctagaatgcagtggtgccatctcagctcaatgccacctctgcccccagggttcaagcaattcttgtgtctcagcctccccagtggctgagattataggcacccaccaccacgcctggctaatttttgtatttttagtacagatggggtttcaccatgttggtcaggctggtctccaactcctgacctcaggtgatccgcccacctcagcctcccaaagtattgggattacagacgtgagccaccgtgcccagcctaattttttttctctcttcagatttgccgggcttacctccttcatttgtttattgtgaattccctgaggatggccagagggacaggcactaccctgggcactgggaggtgagggtggacagagcaggcagggagagtggagtggaagcatccaaatcatcactgcctgtctgggtggcacaacctatacaaatctgactggactgtgtgtgtctctcctctgtgtcccccagggcccgtcacagctggagctgactctccaggcatccaagcaaaatggcacctggccccgagaggtgcttctggtcctcagtgtaaacagcagtgtcttcctgcatctccaggccctgggaatcccactgcacttggcctacgtgagtgtgttccctccaaccccaggctgaggctctggccatgggaggtccctactgtccatctctgtgggtcagggtctcccaccccagcggcccagccctgcttctccctttcatcttgacattattcaccagggtcctgcctggtgaagccaatggtctctaccagagagaacccagagggcaccaggactacagtaaagagtctagaccaagaggtgggagtcaggttgatgtgcagccctggccaactctgatcctctgcataggctcagtttgcctctctgtccagtgggacaactgaactcaatattttatatgataatcttttcattgtctttgaaaaagttacacgacatatatttgaaaatatttaaagacagaggaaaagggccaggagaaaacctaacgtgttaacagtggttatggctgggaagtgggattaggagagacatttagttggttcttcacactttgttgagtttgcaagagttgctctaaatggatttggcctattttggagaaaaaagtatttttaaaaaactcaagttttcaggtcagctgtggatttgggaaaaacaattaaaaacaaacaaccaaaagcctcaacttttaaaagtgttagctatatccaccagagagaggaggtcagggagctgggacccactgccagaggtcagggctggaggaggcagggtggcttgccagcactgcctcctccatgaggaatgtctgggaggtggcccccagatgtgagcagctgttgtttacaacagagaaagcagagggtaggaaggggagagcccgggggagagcaaagatagcaaaggggagagaggcatagaaagaaacatgcccactgcgggagggaggcaggcttgagcgaagttgggcgtgggggacaggggagaagcttccggactggtgacagggacagcacagagacagtcagacatgaccaagccagcatgccaaagtcctaggagggagggggccaaatccaaccaccagggccaagaggatttgactccttgcagcccatccctcggccgcccagaaggggaatcgaggtcccagagggggcgtggcctttaccatggatcctcccccttcccgatctgagtccgtgcagcccagggtgaggcaggaacatgaaacgcgcccgccagccggaaggtcgcagtagccgccggctctggcctcggccgcgccgccttcctcctggggccgcgctgcttcccgagcgggctccctggggccggtggccagaggggacaaagaggccaaggcgcggcctcggtggccgacccagtgccaggcgaccaacagacgtcgtgccctgctgtatccccattttacaggggctgactcaaggatcagatccctttcccaacccagctgtaaagccagtgtcccagccctttcccattccgcgggctgggttcctcacccaagatgcccatcactttgcccccttgttgaatccctacagagaaggtatctacttccttctagatgggccattctagggtgtcttgtctactgttgccatctggcagtcctcaatatctagcttgggccaggcgacctggcttatgtctgtaatcccaacactttggtaagccgaggcaggagggtctcctttttttttttttttttttttttttgagatggagtttcactcttgttgcccaggctggagtgcaatggccccatctcgcctcactgcaaccttcgccttctgggttcaagtaattctcctgcctcagcctcccgagtagctgggattacaggcacctgccaccacccccacctcattttttgtatttttagtagagacagtgtttcataccgtgttggctaggctggtctcgaactcctgacctcaggggatccacccgcctcggcctcccaaagtgctggtttacaggcgtgagccactgtgcctggccaggagggtctcttgaggccaggagttggagaccagcctgggcaacatagtgagaccctcgtctctaaaaaattataataaaaaatatttttaaatccaacccgaagcccttttgcccttctgctgctgctgtttcattcagctcaatgcccttggctttggagactgtacactaagagctcagtcagtggccccaacagcttcctctgaatccttcagctttccagagtcactcttccaggaagtcttccctgtctgctttcctcctcacccccaacccccatttcttctgaggcaatggcagggtaggcagtgagatgctgaagccacccagactccccatccctgtccaaccaggagatctgtctggctcctttgtttcttattaaataaaattctgtcttctattgtttcaaatgacttgatgcatgtctagtttctgaatggtaatatcccctagggcagggaccactgatatctgtctttaattcattaattcattcatccatccctttcttctttcttccctttctccctgtcttcccataggcggggagcacccatcacatgctgggtgtcagggtgacgctggcatgtcaggatcctgtgatgggcccagggcccagcacaaagtcagacaaatctctctcagtgcgtactacgtgtcaagcactgtgcaaggatgggcaaggtagacgttgccccctgtagaccctcacagtgtagggagatccagagcctcagggtatagggagagacagccgcaggatggcgtagatgtgggttgaatgagaacagctctggaggggtgggtgatgtttggacaggtggatgaacaaggtggtgtgttcatctggccccccaggtatgcaagggagaaggggctgatctgactgctagggggctccgggctgactgcagatccaccagccagcattctcagctccggcctctttctctcagccaatgggctgactccacaaattacttcctgacctcctacatgggatagagagggcacagggccaggaacagcgtgctgagcctccacatgtctccccagaattccagcctggtcaccttccaagagcccccgggggtcaacaccacagagctgccatccttccccaagacccagatccttgagtgggcagctgagaggggccccatcacctctgctgctgagctgaatgacccccagagcatcctcctccgactgggccaaggtcagtttccccagcaacctctctgggctcatgatactgctcaggaggaatctgagctcctctggcccacacctcaaacttgggcaccaagagtgcaggaggggacacgctgtgccacagttcacatgccacaagccagtgctgccttgggacagtgatggctcctccaccaaatatcagattgaagcatgtggaatatgccaggttctgacctaaaaccccagcattttcatacgatctattgtgcatctactatgtgccaaagccctatcatgctaggcacttggggacacactcaggccctgccttcctggagctgatactgtgatgagggaggtgacaataaacatgtacatgtacacagataaatctataatttcgggtcttgctgggtggtttcggggctgcagcctaacatgtgtcatgggctcatcccttatgttaacacacggaggcccggggacttgcacagggtcacttggcaggtgagtggtggaagggaagttcgaacctaggtcctctgacgcctctccccctctgcagcaccgtcctgcctgccccaccactatctttggctgtgggtgagggcggggctctgttaggtgcagggctgctgagggaagggactgaggtgcgcgtgtctctgcagcccaggggtcactgtccttctgcatgctggaagccagccaggacatgggccgcacgctcgagtggcggccgcgtactccagccttggtccggggctgccacttggaaggcgtggccggccacaaggaggcgcacatcctgagggtcctgccgggccactcggccgggtatggctctcgccccgcccctgacactagtccccaccccgagagaccacccccctgaccccccccgccccctctccggtcccttataaagccccaccccagtcccagccccagccccgccgcagccctgtgagagcacagtcgctttctcctactctaggctacgccccctatgggccccttccctttgggcacaagcctggccccagtcccatccctatcccataaacccacacctggccaggtaagagtgcagccgccgcccacccgacgccaggcctcgctccccgcctggcctgtccgcttcagtgttccatccgcgtctgtctccccgcaggccccggacggtgacggtgaaggtggaactgagctgcgcacccggggatctcgatgccgtcctcatcctgcagggtcccccctacgtgtcctggctcatcgacgccaaccacaacatgcagatctgggtgagttgtgcgcagctcccgggacacaaaacccaaactcccaacctctggatcagggaagtttcctggaaaggtgaacccccgagctgagctgaaggacaaatcacctatgcccatacgtgagggaaggggccaggcagaagacgcagcaggagtggggacacagcaggaccgaggcctggcataaccctggctggcctgctgtggcacagactgtgtccatggccccctgttctgcctctctccccaccattagaccactggagaatactccttcaagatctttccagagaaaaacattcgtggcttcaagctcccagacacacctcaaggcctcctgggggaggcccggatgctcaatgccagcattgtggcatccttcgtggagctaccgctggccagcattgtctcacttcatgcctccagctgcggtgagcacccttcccctgcccctcccttcccttcccctcccttggatcagtggccacactgttggtgaagcacctctgtgtgagcttgggcaaggtacatcagcctctctgagcctcatttttctcatctgcacatgggaacaatgggagtagctaatcatagaagagcctgagaatcgcttgaacctgggagatggaggttgcagtgagccaagatcgtgccactgcactccagcccgggtaacagagcaaaactccgtctcaaaaaaaaaaaaaaaaaaaaaaaagcctggtgcgggcacacagtgatcacacagtgaccagccgcctggcctgcctctgctaccccacaggtggtaggctgcagacctcacccgcaccgatccagaccactcctcccaaggacacttgtagcccggagctgctcatgtccttgatccagacaaagtgtgccgacgacgccatgaccctggtactaaagaaagagcttgttgcggtaagggaactcctgcccctctggctcaggatgacatggacatctggttcctcccctagcccaagactcttggggtcctagcccaggcaggggggcaagtcacgtccctctgcaagccttagttttcccacttgtataatggaattgataatggtacctaccacgtggtgagaattaaaggcagtctgacaggccaatcacgtggcacagtaagatgtggtacatagtaagtgcttagtaaataatgccagcactaggtagttgtcattattaatcctaaatgctccctgagctggctggtcacttagcagaatacctacacaggccaggcatggtggttcacgcctgtaatctcagcactttgggaggccaagatgggtggatcacttgaggtcaggagtttgagaccagcctggccaacatggtgaaaccctgtctttactaaaatacaaaaattagccagaggtgatgggacacacctgtagtcccagctacttgggaggctgaggaacaagaatcgcttgaacccaggaggcagaggctgcagtgagccgagatcacaccactaaacttcagcctgggcaacagagtgagactctgtctcagaaaaaaaaaaaaaaaaaaaaaaaagccggtgcctgtaatcccagcactttgggaggccgaggcgggtggatcacaaggtcaggagatcgagaccatcctggctaacacagtgaaaccctgtccctactaaaaatacaaaaaattaaccgggtgtggtggcaggcgcctgtagtcccagctaatcgggaggctgaggcaggagaatggtgtgaacccgggaggcagagcttgcagtgagctgagatcgcaccactgtactccagcttgggtgacagagagagactccatctcaaagaaaaaaaaaaaagcctatacaatatgatcactgcctggttgacaaacaaatatatttgttataaaaataacacatggtgaatacaaaatattagccaggcatggtggtaggcgcctgtagtcccagctacttgggaggctgaggcaggagaatggcctgaacccgggaggcggagcttgcagtgagccaagatcatgccactgcactccagcctgggcaacagagcaagactcgtctcaaaataaaatgaaagaacacatgctggccaggcacagtggctcacacctgtaaccctagcactttggaggccgaggcaggcagattgccggagctcaagagtttgagaccagcctgggcaacacggtgaaaccctgtctctactaaaatagaaaaaattagccggacgtggtggtgcacgcctgtagtcccagctactcaggaggctgaggcaggagaatcgcttgaacccggtagagggagattgcagtgagctgagattgtgccactgcactccagcctgggcgacagagcgagactccatttcaaacaaacaaacaaaaaacatgctttaaaaaatatgtgaaaattagaaaatcttaaccttctgacacaaagacaatggctgccaacattttggtgtgcttctttctagagcgttttctctgtgtatttcttatattgatgtaatcataagagatgtgttcatttgtctcttactatttcacttaatgtatttttagagctttgacagctgtacctaatatcatgtttaataagcacatattattccatcatattgacatgctataattaactcctcttcccttgttacacatttaggttgttcccaattctgtagtattataaatatgcaaaaaatgtcattgtgcatgaaacatttctttatataggattattttctcaggatagatttccacattagtggaattactgggtcaaaatgaatgaagtttcaatacatgttgccaacccactttcccaaagatgatttgaattttcaccactgatttacgagaacacctcaacctcttcgctgtctccagactataattcaaaaaaagagaaacctttgccagtgtgggaagaggcacatggcgttccattcttgttttagttgtaattctctggttagtagtgagtgtgggcatggttccacgtgagtgatgagaacctcagtctccttatcattgaggcttggtatttttcttgatgatttttataagttttaataaagaaaaaaaggttgcccctttggccaccacttcccttgatttgctgtaattctttcaattttggctacagtggtttttcttttcttttctttttttttctttgagacagtcttgctctgtcacccaggctggagttcagtggtacaatctcggctcactgcaacctccacctcccgggttcaagtgattctcctgcctcagcctcctgagtagttgggaatacaggcgtgcaccaccacgcctggctttttttttttttttttttttttaagacagtctcacactattgcccgggctggagtacaatggcacaatctcggctcactgaaacctctgcctcccgggttcaagcaattctcctgcctcagcctcccgagtagctgggattacaggtgcccaccaccactcttggcttattttttgtatttttttttttagcagagacggggtttcactatgttggtcaggctggtctcgaactcctgaccttgtgatccgcccacctcggcctcccaaagtgctgggattacaggtgtgaaatcaggcgcctggtccgcagcctagctacttttttgtatttttagtagagacagggtttcaccatattggccaggctggtctcgaacttccgacctcaggtcatctgcctacctcagcctcccaaagtgcggggattacaggcgtgagccactgcaactggccttctttttcttgttttagagacgaggtctcgctctgtcaccaaggctggagtgcaatgatgtgatctcggctcactgcagcctcctcctctcaggttcaagcgattcttgtgcctcagccttcccagtagctgggactatgggtgtctgccaccacacctggctaatttttataattttagtagagtcgggtttcactatgttggctaggcaggtctcgaacttctggcctcctgtgatctgcctgcctctgcctaccaaagtgctgggattacaggcgtgagccaccacgcccagcctgtgctagacttttatatgaccggcagtgcaataagtttgcttacaccagcatcaccacaaacactaggcaatagaaatttttcagcttcgttataattttatgggaccagggaccaccatcatatacacagtccatcaccgaccacaacattgtcccatggtgcatgacagtatttactatctggctctttataggaacacttcgcccacgccaggcctgagactggattatgcttgcagggtttgcatgcccttggggctgtgagtgatgattatatgtggaacttgaaggaatatatatatatatattttttttttttgagacggagtctcgctctgttgcccaggctggagtgcaatggtgcgatctcggctcactgcaaactccgcctcccgggctcacgccattttcctgcctcagcctcccgagtagctgggactacgggagcccgccaccacgcccggctaatttttttgtatttttagtagagacggggtttcatcatgttagccaggatggtctcgatctcctgacctcatgatccacctgcctcagcctcccaaagtgctgggattacaggcgtgagccaccgtacccggcctgaaggaatatttttaatagttctgtatttattttgatagatataagaaaatttggccaggcgcggtggctcacgcctgtaatccctgcaatgggaggccgaggcaggtggatcacctgaggtcaggagtttgagaccagcctggccaacatggtgaaaccctatctctactaaaaatacaaaaaagtagccgggcatggtggcacgtgcctgtaatcccagcaactcaggaggccaaggcaggagaatcgcttgaacccaggaggtggaggttgtagtgagccaagatcgagccactgcacctgggcaaaaagagtgagactccatctcaaaaaaaagaacttttaagtggtgtaggatgatgacatctaacaaaaatgaagagggagcagggcaggggaatggctgtgacttgggacccctgggttgtggtcagtccttggtgctggggtgtggcaggccacagagaccccagtgcctcctgatggtgcccctctcttccgacccagcatttgaagtgcaccatcacgggcctgaccttctgggaccccagctgtgaggcagaggacaggggtgacaagtttgtcttgcgcagtgcttactccagctgtggcatgcaggtgtcagcaagtatgatcagcaatgaggtaagagctggggccaaaaaggtatcaggaccagcctggttggtgccccctcaggtgccctccctgatcccccagggtggaggtgtgtttgggagagcaggctgcaggggctcagaacacaagacaagcttggccattggttggcttagtctccccatctgcaaaaatgggcgtattgggtgggataccctctggggtcctttctggctctgaccagctccctggctttatccccgcaggcggtggtcaatatcctgtcgagctcatcaccacagcgggtgagatggacagtcacgtgctaacccacctggcccaggggctgctgctgggccggggcctcttcctggcctgggagggagcaggcctcgggaaactcctggcaagccatgtgtgtctggaatgcctcggtctccccttctgtatgaccggagcaggactgctgagggtgacgctcttggtctctcaagtcagagggcttagcacatactggctgtgtggccttgggcaagtcactttagttttctgggcccaaaggtggcctaagaaaggactctgcgccacagggtgcttctgggcagccaatgaggtgctgtgtggaagctcttcacacagcctggcagctggtgcctccttgataaatattagtttaaaaaaaaaaaaaagggccgggcgcagtggctcacgcctgtaatcgcagcactttgggaggccgaggcgggcagatcacgaggtgaagagattgagaccatcctggctaacatggtgaaaccccgtatctactaaaaatacaaaaaattagccgggcgtggtggcgggcacctgtaatcccagctacttgggaggctgaggtaggagaatggcatgaacccgggaggcggagcttgcagtgagctgagatcgcaccactgcactccagcctgggcgacagagcgagactccgtctcaaaaaaaaaaaaaaagagagtcaggcaactccacagggccatgatgcctgttcctccccacacccctcgccctcctggctggcgccgccagattgaccaagtctccctcccgtcctcccccagaaaaaggtgcactgcctcaacatggacagcctctctttccagctgggcctctacctcagcccacacttcctccaggcctccaacaccatcgagccggggcagcagagctttgtgcaggtacctggcatgcctgtcacccctcgggcctcccagctcctggaacttcctctccgcctttcttcccaccatgactccagaggagatgagactcccagagtcaggagggagacagcctgggtgcacgggagagggagagacagagaaggcattgctcagggacactgacaaggatgtggccctgtcctcctcctctgccccagacaggtccatgtctttctttccactgtgaggactcaggggtgggaactcttaattctagccgatatttgaaggcagcaggtggggtggggtgaagagcagctgcccatgccgcgtggccctacctacccatgcaggtcagagtgtccccatccgtctccgagttcctgctccagttagacagctgccacctggacttggggcctgagggaggcaccgtggaactcatccagggccgggcggccaagggcaactgtgtgagcctgctgtccccaagccccgagggtgacccgcgcttcagcttcctcctccacttctacacagtacccatacccaaaaccggcaccctcagctgcacggtagccctgcgtcccaagaccgggtctcaagaccaggtgagtggggcctgggccggccccagcttcaagtgggagcttccaggtctgtggtttgcaggaagggacatggcagcccacagggatgtggggccagctggtgaggggcggagccttaatcaggcatgtggcctggcagtctggctgccagcagcactttctgccacccgagagctttctggtgggactgctgtgtctggggcactggcagactatgcagctgccactgtccatctatccatccatccatcctttcacttacccgtccgtccatccatccatccaccctcccacccaggaatctaaccacccgcacatccatgtagtatggtcaccagtgtaatctcaaagaacaggagacctgagggaagagaggcggacaaaggacacacactcctggctttctgtatttgccagtcacaacacttcaccatctggtgacccccactctcaggcaatctatcctggacgcccccagagtcacccccaggcccttgcacagacaggcctccaggattacaaacttctctggtcataggaagctagggaagccttcaactcccctaagtgggcctctccctccagccagagtgagcctgggactctgggctgacctggctcatagctccaaagtgttcacaagggtgagggatgcatagtgcttccacagtgctcctgggcatcaaggcctccaggaactcacaggaaacatttcagcagcagccagggatcgtccactaggcaccctcccacagcacagatcttccaggactcacccagaggcatccagctacgaagcggtggagatgggattcaaagccaaggctctagggtgggctggggtcacggagccagggagtaaacctggaagccgcctcccaaaggtgccacatactgctctctctttctcctccaggaagtccataggactgtcttcatgcgcttgaacatcatcagccctgacctgtctggtgagctccctccaggtctctcgggtttgttctagtggctgaggtcacagtagggcacagcgggcagccctgagaaacggcctgggcacatagcacatggcaagggggaccccagagaaagcggcccagaaggggcaggaggagggcttcccagagccatagcagcctagagcaggggccagagctgcactttgcagatggagagcccttgcccgggaccgccctgtggggtgggagtctaggcctctgcccccactcacggctccactccatccccacagttattggctgaccttgctgggaggatggagtctcctgggtgagacagaggccctttgagggtgggtgctggccttgccttccttgaggcctctccctgcaggacgccccctctagcctctccatcagttccccccaggcccaggcccacaccaggcagaagagtcccgacactggtggcagaggcaggggtgagggatgggggcacctacctctttgccaccccatccaggccaggatggagcctccactcccagcccaggaccaagaaggcagggctgataaccccatgacacagaatcggatgtcagaggctcaaggaaagactgcttggcccatagccacacaggagtcaggaatgtggagggaatgaggcttggagcaatccaagagcagagctgcagggcactcggagctgctctggcccattctctacctgctaaaggcctcagagaggggcagggttgacccaaggtcatgcagcaggtggggcaggctctgtactcccgagcctcagtttcctcacgttaccccatccatcctccctgaaaacgccatctccatcagccttgaggggcagaggcatgacccaaaaggcctggctgggccctctaggtggacagtcctagcaaccatggctcaatgccaggcctggctgtgatgagcccgtttgctgcaagaggagactgaggttcagagaagtcgagggtccatggctgagcagagctggcaccaaagcccacatgggccagcacaacagggtaggggatggggcaggggcagagtggcagtgctgatggcgtcggccctctctaggttgcacaagcaaaggcctcgtcctgcccgccgtgctgggcatcacctttggtgccttcctcatcggggccctgctcactgctgcactctggtacatctactcgcacacgcgtgagtaccccaggcccccacagtgagcatgccgggcccctccatccacccgggggagcccagtgaagcctctgagggattgaggggccctggccaggaccctgacctccgcccctgcccccgctcccgctcccaggttcccccagcaagcgggagcccgtggtggcggtggctgccccggcctcctcggagagcagcagcaccaaccacagcatcgggagcacccagagcaccccctgctccaccagcagcatggcatagccccggccccccgcgctcgcccagcaggagagactgagcagccgccagctgggagcactggtgtgaactcaccctgggagccagtcctccactcgacccagaatggagcctgctctccgcgcctacccttcccgcctccctctcagaggcctgctgccagtgcagccactggcttggaacaccttggggtccctccaccccacagaaccttcaacccagtgggtctgggatatggctgcccaggagacagaccacttgccacgctgttgtaaaaacccaagtccctgtcatttgaacctggatccagcactggtgaactgagctgggcaggaagggagaacttgaaacagattcaggccagcccagccaggccaacagcacctccccgctgggaagagaagagggcccagcccagagccacctggatctatccctgcggcctccacacctgaacttgcctaactaactggcaggggagacaggagcctagcggagcccagcctgggagcccagagggtggcaagaacagtgggcgttgggagcctagctcctgccacatggagccccctctgccggtcgggcagccagcagagggggagtagccaagctgcttgtcctgggcctgcccctgtgtattcaccaccaataaatcagaccatgaaaccagtgatgggttgggctgggagaagggcagtgacattcaaagccagggtggggtgagggcacaggacagggctgcttttgtagttggcccccactgggctggcctggtggcaggggtggcatcctgaacagtagcagcatccagggcacagcaggttttcattcagccagttcccctctgccattcacccactcgacagcacaccccagggtctaggctgcaagaaagcaaacaccaggaggccccatccacactctcactctggggttccgaacacaggccctcgactgctctaagttcaaatcctggacctgccaccttgttggcctgtgactgtaggcaggtcccatggcttttttttttttgagatggagtcttgctctgtcgcccaggctggagtacagtggcactatctctatctcagctcactgcaacctctgcctcccaggttcaagcaattgtcctgcctcagcctcccgagtagctgggactacaggcatgcgccaccacgtccagctaataatttttgtatttttagcagagacggggtttcaccatgttggccagatggtctcgacctcttgacctcatgatccgcccgcctca

SEQ ID NO: 7 - DNA, 4981 bp, Homo sapiens
cctataactatcttctgaatgggaggctccaagagctgcagtgacttgttccaggtgacatttgcagggaatcggtgagggagttgagatcccagcctgtgtctagtttgactcatcaccgcactaaattgcacgggagccatattcactcgtgatctctaatgctcagcagtgcatcccaccaacagagcagggaggcttgctggcaggttccgattctgcaaggagcaggcctcttctgagccctgatgtggtccccacactctccccatctccccagcccccacggttcactgtgatcttgtgctgtcctttctatatttggaggactacttggtcttgtttcctggattcttcactcctgtggcccaggagatggagcatatgtcaccctgcctggagattcttctgaagagccctggcaaggaaatgagaaagtatcctaattagggggcaataaccccctggagaagcacagattctttacagtaggccgtgtccttcccgcatgccctgtgtgtttgtcagatgtttatagagccttcattaacggaaggctccctcagataagacgtcggagcgcggcatcgaggaccagataagcacaagtggaggacaatccagcccggcagcgggtgagagtgggtgctggccaggacggttccttcagagcaaacagcagggagatgccggcccgctccttcccagctcctccccgtgcccgctaacacagcacggccgcctgcagtctcctctctgggtgattgcgcgggcctaagatgtgtcctggggcactgtgggtggccctgcccctgctgtccctgctggctggctccctacaggggaagccactgcagagctggggacgagggtctgctgggggaaacgcccacagcccactgggggtgcctggaggtgggctgcctgagcacaccttcaacctgaagatgtttctggagaacgtgaaggtggatttcctgcgcagccttaacctgagtggggtcccttcgcaggacaaaaccagggtggagccgccgcagtacatgattgacctgtacaacaggtacacgtccgataagtcgactacgccagcgtccaacattgtgcggagcttcagcatggaaggtagggtctccgcttgcaccatgcgcgctggggtgggactcacaggtccacagctgctttccccagggtggaggccactggccataggaggctcttcaagcttccatttaaattagttacaatgaaataaaattaaaacttatttctttagcctcaccagcttcctttcaaatgcgtggctaatggcttccctatcaggcagtgcagactgaagaacatttccatggttactgagagttctactcagcacttctgttgtgaaggattcaccttccccaagctgtgtgccacatttcacacagcaggtgcacagggatgccagctctcttttttccaccccttctctttactctcctcttctttgcatcactcccctctgattcacttctcttcctttcccccttcccttcctgtccccttcctacttcagaacagaacaggcaacctatttcacctccaactaactgggatatttttaaattttcaaagcacatctattcctttcttatgaaacggttttaaaaatcagataaaattcttggacagagaagtgttggcagagaacctaattgtttttaaatagaaatatatctgatttagaaggactagaagataacaaacacggacctaggacctatgtcctaactcagacaagctcacatgatgcaggggaaataagtttctgaagagcaaaactgttcagtcaaagcttgcagccaccaagggtacccacccatgtcacctaggaagtgttaagcctgcacacctaggaagtgttaaacctgtctgcctgcagagctggcttttcctgctgctgctgtctccctctgaatgtccaggagcacagagcctctcccttcctgggtctgagacttgcaaatggctaaggggcctggctccataccacgcccaggccagacctaactggtctgcagaggcaggactggcacttcaaaacctgccagctaggtttccctatagcacagggtctccacacatgtgggtatatagcaagtgctgaaaaaatgcaacctcttttccctgtctgtgaaccagccattgtatagcaggagcgtgctaatgacaaagtgtcagcccaggataaatgggatatcgagataactatgtggctaaaagccaagccccatttttgcttgacatgacaaagcaattgaagctaatagattttgttcctgaaacactaaaaccaattatccacttttgctttgtttggaaattacaatttcaaacgatttatacactgtttagaggctgagatttttgatattgtcttaatattggggtttcactgtccccacccaggatctctcctttaaattcatacactcaggatcttcactcaggatctgacagtgagtttttctgttttctttatgtactcaatagctgtgtgctagtaagtcccagaatacttaactagctgtatgcattttggcaattaactgccttgaatcccagtctccacatctgcaaatgtggaataataattagatcctcccagggtaagtgagaggattaaggtgaaatgtattctgcaaagctcccagtgtaatgcctggcacatagtagatgctcgataaacagtaggaactctcaatcccaattggaggcatctcctttggaagatcttaagtgtacctttcaaaatactcttatactttaagggcttgggtgaaaccaaatagagataatacagaccaaaattgttatcccagatgctcttctgtctaaaccctgagactcagcttcagtgtcatggaaacagaccctccagcagatgcccaccacgtgtgtttgcatttcagatgccatctccataactgccacagaggacttccccttccagaagcacatcttgctcttcaacatctccattcctaggcatgagcagatcaccagagctgagctccgactctatgtctcctgtcaaaatcacgtggacccctctcatgacctgaaaggaagcgtggtcatttatgatgttctggatggaacagatgcctgggatagtgctacagagaccaagaccttcctggtgtcccaggacattcaggatgagggctgggagaccttggaagtgtccagcgccgtgaagcgctgggtccggtccgactccaccaagagcaaaaataagctggaagtgactgtggagagccacaggaagggctgcgacacgctggacatcagtgtccccccaggttccagaaacctgcccttctttgttgtcttctccaatgaccacagcagtgggaccaaggagaccaggctggagctgagggagatgatcagccatgaacaagagagcgtgctcaagaagctgtccaaggacggctccacagaggcaggtgagagcagtcacgaggaggacacggatggccacgtggctgcggggtcgactttagccaggcggaaaaggagcgccggggctggcagccactgtcaaaagacctccctgcgggtaaacttcgaggacatcggctgggacagctggatcattgcacccaaggagtatgaagcctacgagtgtaagggcggctgcttcttccccttggctgacgatgtgacgccgacgaaacacgctatcgtgcagaccctggtgcatctcaagttccccacaaaggtgggcaaggcctgctgtgtgcccaccaaactgagccccatctccgtcctctacaaggatgacatgggggtgcccaccctcaagtaccattacgagggcatgagcgtggcagagtgtgggtgcaggtagtatctgcctgcggggctggggaggcaggccaaaggggctccacatgagaggtcctgcatgcccctgggcacaacaaggactgattcaatctgcatgccagcctggaggaggaaagggagcctgctctccctccccacaccccacccaaagcatacaccgctgagctcaactgccagggaaggctaaggaaatggggatttgagcacaacaggaaagcctgggagggttgttgggatgcaaggaggtgatgaaaaggagacagggggaaaaataatccatagtcagcagaaaacaacagcagtgagccagaggagcacaggcgggcaggtcactgcagagactgatggaagttagagaggtggaggaggccagctcgctccaaaacccttggggagtagagggaaggagcaggccgcgtgtcacacccatcattgtatgttatttcccacaacccagttggaggggcatggcttccaatttagagacataaaacacaggcagatcaagtagcattgatcaatggcatgattccaactcagatttgtgggacaccaaagcccaggatcttcccaagtgccctgctgcagtttagcaggtcctctccagctaaagagcagtgagacattgggagcccaggagtgttgaggccaggccaggctgaggcccatcagtcacaggtgtgactgggctgcttgtcacacacagggcgtggtctggccactgttgccagtgctcactcagcggccacatgctttttaatatgacccctgaggcactgaaaaataaccccaggccaactgcaggatagagagagaggtcaggacagcagccctgtgggctgcatgatacactgtggctggagttattgtgaccccctggtgcagtgctcccacggccagtggtgcacacagggccattcactgtccatagactgaaaccatgtgaccatttgagagggccgggcacactttcccctgagggatggggcagcctgtggccagcacctctgcagttactctgcatagccagctcaccagcatgccatgcccagggtgccccccagtgacaacctcatgggagacgggc

SEQ ID NO: 8 - DNA, 4000 bp, Homo sapiens
agatgcttctccattgatacatgtatttcaaggtccgtaactacgtggcccccctcccttctgtaatccttcccaaagaaataccgttatttctccaaaataaaaaggactggtgtctcccgtctctgtctctcatactccgactcagctcaaagcctcgtccctttagcccaaggcacttcgttcctcctggagtccactcggcttccagcgggttcccaggtgaactgaaatccagagctattctcatctggttgccctgggaatttcagcgctgtcggtacaacctgttcctccatcctccccactccttccctccctccgctgggctgcacccttctcagcccctcctttcccttgctaggggccccagctgcgccctccggggagacacccgctgccacgagacccgggaggggaagcgggaggagggggagaggaggggaaggcgggggaggcgccgagggtggaggccaagcgcggcgcagccagagaggggcggctgaaggttgcatctgctggaaggaggcttttcggctgcttggtaacgggctgccagaagagagagaggcagagagcagggcagcggcttcttgacgtcagggccaagcgaggggatcgcgccagcaaccccagctctccccagagaggggccggccgaccgctggagcggagcctgacgccaggcgcccgcggagcgtgagtagggggcgcgggagccggtcagctggggcgcagcatgccctctgctcccgcgccatggagatcgccctggtgcccctggagaacggcggtgccatgaccgtcagaggaggcgatgaggcccgggcaggctgcggccaggccacagggggagagctccagtgtcccccgacggctgggctcagcgatgggcccaaggagccggcgccaaaggggcgcggcgcgcagagagacgcggactcgggagtgcggcccttgcctccgctgccggacccgggagtgcggcccttgcctccgctgccagaggagctgccacggcctcgacggccgcctcccgaggacgaggaggaagaaggcgatcccggcctgggcacggtggaggaccaggctctgggcacggcgtccctgcaccaccagcgcgtccacatcaacatctccgggctgcgctttgagacgcagctgggcaccctggcgcagttccccaacacactcctgggggaccccgccaagcgcctgcgctacttcgaccccctgaggaacgagtacttcttcgaccgcaaccggcccagcttcgacggtatcctctactactaccagtccgggggccgcctgcggaggccggtcaacgtctccctggacgtgttcgcggacgagatacgcttctaccagctgggggacgaggccatggagcgcttccgcgaggatgagggcttcattaaagaagaggagaagcccctgccccgcaacgagttccagcgccaggtgtggcttatcttcgagtatccggagagctctgggtccgcgcgggccatcgccatcgtctcggtcttggttatcctcatctccatcatcaccttctgcttggagaccctgcctgagttcagggatgaacgtgagctgctccgccaccctccggcgccccaccagcctcccgcgcccgcccctggggccaacggcagcggggtcatggccccgccctctggccctacggtggcaccgctcctgcccaggaccctggccgaccccttcttcatcgtggagaccacgtgcgtcatctggttcaccttcgagctgctcgtgcgcttcttcgcctgccccagcaaggcagggttctcccggaacatcatgaacatcatcgatgtggtggccatcttcccctacttcatcaccctgggcaccgaactggcagagcagcagccagggggtggaggaggcggccagaatgggcagcaggccatgtccctggccatcctccgagtcatccgcctggtccgggtgttccgcatcttcaagctctcccgccactccaaggggctgcagatcctgggcaagaccttgcaggcctccatgagggagctggggctgctcatcttcttcctcttcatcggggtcatcctcttctccagtgccgtctacttcgcagaggctgacaaccagggaacccatttctctagcatccctgacgccttctggtgggcagtggtcaccatgaccactgtgggctacggggacatgaggcccatcactgttgggggcaagatcgtgggctcgctgtgtgccatcgccggggtcctcaccattgccctgcctgtgcccgtcatcgtctccaacttcaactacttctaccaccgggaaacggatcacgaggagccggcagtccttaaggaagagcagggcactcagagccaggggccggggctggacagaggagtccagcggaaggtcagcgggagcaggggatccttctgcaaggctggggggaccctggagaatgcagacagtgcccgaaggggcagctgccccctagagaagtgtaacgtcaaggccaagagcaacgtggacttgcggaggtccctttatgccctctgcctggacaccagccgggaaacagatttgtgaaaggagattcaggcagactggtggcagtggagtagggaatgggaggcttgctgaacatggatatctacattataccgcagagtatttgaagtcacactgtaacctcagtctacccctctcctttcactcctttcctccctccctcgatccccccattttctctattctttccatgacacccaagggtcgcctatttttaaaaagtaccacattccatgacgcaggagctgtggaaatggtgagcgctgtgagatggatgtatttgtagccagtctcctatacccagcagagggataacccaaacaaaaatgactctaaatagcccagatcccaagagattatgtaactcctccatccatgtgttccaaatttgctttacatatgattgtatttgtgtataggggaaaatattatttttatgcctggtaagtggctttttgtactgtagttcagatagagatattttgggtatattttcaagatacatgttgtatttatggaagaaagagttgtcctgatgtttttctgtgttacttatattagagtcagagatcttggtatgggctgttctgtttcctgtgtctccaagcctctgtcttttctgggatgtggtattggtgctttgtgtctagggcagagtatgttcttgaagaaaggcaaatctgactttttctgtgcgccttaaacaattcttgtaactttcttcaaaaagcattttaatgatattggaggaatacttctgataatttattgtctttatttttatcccaggaaataaaaggttaccttgttgaggcaagtgttagtttttctgcagctgatacattttctgaaatttttaaaaatagtctgtcactggctgtttctggttttgacatcagagcaaacgcattgactggggttagaggaaatctgaaaagctcatgatttgcttggcgacgtcttttcagtgcaccccttggtgcctcatagacaatggtgggtgaattttgtccaggctgtttatggcacggacgcccctgtgagatgctctctgaagcagtagtatcagcccttatggtcagcctggagtagggagggcacttaaaggaaaaaggggatcagacccctgacagtcttattgggtctcccggcactggctttcattcctttgtttgcaggttttcagccctcctcagggtggctctcagcagctctgagaaaagcaagcctgattctcacagacatgaagcagtcctggcagccccagtgtgcgagtcacagagggacctgcaccggttgttcactgccctcttggcatggcagaggagcacgtaatgtctttatggcaacagcaacagtgagaggccaaatggaaggatttgcttgttcacattaagagctgttttctgcagattgt

SEQ ID NO: 9 - DNA, 41931 bp, Homo sapiens
gtgtcacttgacctctctgggcctccatttcctcatccataggataagggcaggacagcgaggccccaagtgcctcctggctgcaatatgctgtgatgagggtggagggtggggtggggaggggctcgctctgccttccttgccttcctgtctgtttctctgtcattagtttatctccagcaatccaggcctctctgtctcagtctgttgctctctctgtttccatcttttgctctgtatttttctgcccgcctctcttctttttctgtctgagtgcacctctgattttatctcctcctctgtcacacagcccccttccctcagtcctacactgcctttctcccattctccgtagttatcagcgtttcgctgtctagttttctctgtctctcgggctcgctctctctctctttctctctctctgtcctgcccgggctctctcgcggccgcccctcccgtcccctccgccagcccccctcctccctcctcggcgcgtctccccagtccttatttggctgggcgggagggctggcgggaggaggcggcctgcgggcggggggcggggggcgggcgcggggccgggcggaggagggcggtgggtggtgctgaagggacagctccgcggcggcggcggcggcggcggccccgggcgctgagcgggtgcccggcgcggagagcggcgagcgcagccatgccccaggccgcctccggggcagcagcagcggcggccggggccgaggcgcgggccgggggcgccggggggccggcggcggcccgggcgggacgatgaagcggcagaacgtgcgcacgctggcgctcatcgtgtgcaccttcacctacctgctggtgggcgccgcggtcttcgacgcgctggagtcggagcccgagctgatcgagcggcagcggctggagctgcggcagcaggagctgcgggcgcgctacaacctcagccagggcggctacgaggagctggagcgcgtcgtgctgcgcctcaagccgcacaaggccggcgtgcagtggcgcttcgccggctccttctacttcgccatcaccgtcatcaccaccatcggtaacggctcgccgggcggggggcgggaacccagggctgggcgcggggctccgggagtcgtccggggccggctggggctgggggcgggggctcccccgagaggggctgggcgccgaaccctgcgctcgcagaaacccgagttcagcctggcgtgtgtgctccgcggggacggaactcggggaggcgtcgattcctggctccggacctgactctccggccgggccagccctaacttggccctgccatgttgcataggcccccagggactccgaagtgtgtgagaggggcagggacgaccggcggaggctcgggcaggaggggtgtggccgggccaggccctgaacagggcgctgagagtgagcggcgggagagcgccagtgctccgtatccctgaggatcggcttccacagcctagcaggtctacacctgctgggctctggggaggcatgaggatgtcggaatgcggcacttcggggcacttggggccaccctataacggcggctgtgagtgtacgtgtgtctgcgtgtttcagctccaggagtttggtcgccaccagtcagtgcctgtgattttctcagagcggcagaattggtgcgggaagccagatctggccttgtcagccttcttctctgctgtcccagcaaaacagtcacctcacaggaataaccccagttctttccaagccagggcagatcaccatgtaggaggccacacgtacacccagactgtcagacaacacaggcataggcacacatgcacacagatacacacaggcactcacagggtacacacagggcgggcacacacacacacacacacagagagagagacagagagagagagagagaacaaacgttgcccaggaaaggaatctctagccaggcccttggtggtgctattcaaaactgtccagacgggaataacaccttacctgtccccaacaccctatgatttcagcccagctccatcactaccgtgatatatgaccttgggcaagtcccttcccctgtctgggtctcaggctcacctccagacaaggaggggtggccaaaatgatctcaagagctcctccccagccccgacgtgcttggattctgagatgaaacccaccttcccccaaagcccattgagatgcctccagaagcagtttcctctgtctttactgttccctctcctctccctagtccccttccctgccttgatcagactcccaggggttcgttgccacttagcgcagcccatgaagatggcattgttttcctgggagtcaacaggagctgagggagtaaaaggcaggactagacactcttcctgcggtctatccactgcaggacactgttccaagaatctacggctccctggggaccatggggagctatgctgtgtcgtttctggattcttctcttggaagagggaggaaagggccctgggagtggatgtggcccagctggggcacctctgggtcctactggtcctgtgagtttaggataggatgatcagacttaggtctgcccaaagaggagcccgcttcctgaaaaacaccagcccagatttggtctgcagtctcttccactctcacaccccactactatttgccagggtttcagtagctgtttagctgtctggagaatcaaaagaatcagactgaacatctttggaccctctctctccctcttttccacacgtcaagccttcacgcgtgtcccctttccttctcaggcccatggtccccagcttcatagtaacctcccaactgacctccctgcctaccccacaacaaggcatgctcccctggacaatgctgccagaaagaaaaactcagctgtcaccaaaccaattcccttcttggaatccctcaatgactctccactgtccatggaatctggtctatgctccttatctcaaattttgaggatctccatacctggctccaacctctatgtctgacttcacatctcacttcttacttatgtgatccctctcgatagctgccaacctgtcctctgagaataccttaagtatgcctgtctggcatgcctttttctctgccctttttcttttcttttttctttttttgagagaaagagtctcactctgtctcacccaggctggaatgcagtggtgtaatcatagttcagcacaacctcaaacccctggcctcaagcgatcctctcacctgggcctcccaaagtgctgggattacaggtgtgagccactgcgcctggctctaccttctatttatcttgtccatgctaaccttccaggtccagctcaaatcccccctcctcctcaaagcctcccaggccactgctctggacaactgcaggtctcactgtgaggatgatctgggtgacacgctgttggctgttttgaatggttatttgcattataggggaagtgttttgtctctttgaccacactgtactcaacctccatgtgggcaggtcctgcagttcctgtctctgtgctccaagtgccagcatagtacccagaggctgtgagcacacacagaatgctattgatgggtttaaggtgtgcagaaatgaaagggtagcatccttccctcttcctctgccgtttcccaaagtgcttgcagtcctcaccaagagagacgctaaaagccatggggggagaggcagacagagtgcggttctggtgattatttatttataaagtgctgggcaagaggaaagacaacatcagaccacccccctggttctgtgggggcccctccctccctgccccacctgaccatcctggctttgtgttgccttccactgtggctatgccaccttgctggaagctgtccacaggggctctgctctaagaaaaacctatttgggctgtgatcagatggtagaaaggggccttagttaggctgataatggccccaaacccaagggcagcagcctgtgttcacctgacccctttgaaaacatgaatgagtctcattctgagataccgggtgtcccattgggatggaataatgacagcacttcccatcatttgctaccttagtgatcacaatgcacttgcatctcttgtcatgattctcagtcttcatgacttggtgaagttgctgggcaggtattgttagctctgctgcatggatgaaggcgtgaaggctcagggaagggaagcggctcccccagtcacccagctggtaagcagcagagtcagagtgggaagctgggtcttctgactccaagcccagtgctctttccctgctggtcttttggctgcttcctttgactccatatgctatgaagctcagacccagccaggcctgacacagccaagccgtgcttagtgatgccagctcacagggtgctcatgggcagccctgattggttggaggtcagcaggttctttcttagtcattcacctggttagtcaccgtctccactggctggaaggattcctccagctccctatccctggtctcccagccaggaaacccttcctttgctggtgccctaagttcacccaacagtaatagaaagtcatttcttaggaagtcttaaccactttagctgttgagtcattaaactcctccagggcccaagcctcatctattcatagctcagaggctgtcagagcaggaaggggcttcggagatcagctggtaccaccccctgctctgacagataaggagtcagagaggtgacagaaatcacacagtcagagggtagcaaaaacctaacccccagtcccctactccttctacttgttcaggatacttatttattatttttattaacaacagcagcagcaacaacaataacaatggcaaccaccatttattatttactttgtggcaggctctatactagacgcttcatttgtacccccttatttaattctctcaccaacctctctagataggcattattacccccatttttcagctgaggaacctgaggctctgagggtagatgactcccccatggcctcaggcctcggaagcatggcacttgcccagattcaattggacctctctgactctcctgccctgaatttttcacgaattctttctccatttcaagagcccattccatgctgggtgcagtggctgacaccggtaatcccagcactttgggaggcggaggcagaagtagacagatcgcttgaggccaggaggtccagaccagcccggacaacatggcaaaacccagtctctactaaaaatacaaaaattagccaggcatggtggttcatgcctgtagtcccagctactcaggaggctgaggcatgagaatcacttgaacgcagaaggcagaggctgcagtgagccgagatcgcaccattgcactccagcctagggcacctagaagccaaggcttgccttttccccagcaaagccctccccagaagcagggggcttcctgctcgagcacactccagtcaggcctgctgcttgccacaccctggcccctgaccaaaccagacgacttgtcacagctgtgcccagcacccgccatgggcacctgccatgggctcgcaggtgcccattctcccactgcaggtcctgggaatctttttggctctaaggcaacaacaaagagaccaggtgattgattcgctgatggggctggggcagaaaaccttctgttccgctctttccccagcttccagcctgtgctcagctgagcaccacctcccgtcacccaccacatggcctgagaacccttagactgtgaactcaagcaggtgattcatgaggaaacctatactttttacatcttttcaagaaggagagtacagatgtgacctgccacccccaaaatcccagaggtcctaaaataagagaaggagacattagcaatcttccaaacacccagagaggtgagcggcttgtccacactcacacagggagttgagagtatgaccctgactagaagccaggccttccagtgcctgcactggtgttctctgcatcctccagcctgtcccccacatcccaccatctctcttagcactcaggcctctggcagctcatcactccattgttcgaggcctctttcgactttccaaggtgaaggaagggtagcccagcctaggaaagtcccggcacccacctcagttggcatttccttcctgcccacaggctagcccgtgggcgtgcttcgaccccacaatttctgcagggcagcggaggaacataggcactgacttggaagctggagtgcctgggttcatctcaatccaccctatccccattcccctactgccactagctgtatgtccttggacacattatctaatctctctgagcttgttttgtcatttacaaagtggggataataatatctgcctgccaggattaaatgggatcataaaaagaaagtgcctggtacagagaaggcacttaataatttgccattattattgttattaatactattgtttgtgcattattacttgccttaccaaggaactgctctgtctcccaagggttaccatgaccacggctacttctgctgcttcctaacaggtgggaacagtgaggttgagggccaggagattgccacaccctttccccttatcttcccaatcccactccccaccccccatctccccgctcctcagccatgcctggtgtttccctaactgtccaggctcctgctcctcctcagagcagaaagctagcaaggggctgggcgtggtggctcatacctgtaatcccagcactttgggaggctgaggtgggcagaccttgcagaaagctagccaggggctgggtgtggtggctcacacctgtaatcacagcactttgggaagccgaggtgggcagatcgcgtgaggtcaggagttcaagaccagcctggtcaacaatggtgaaacccttcctctactaaaaatacaaaacttagccgggcatggtagcacacgcctgtgatcccggctatgcaggaggctgaggcaggagaatcgcttaaacctgggaggcagaggttgcagtgagccaagatcgcgccactgcaccccagcctgggcaacacagcaagactccgtctcagaaaaaaaaaaaaaaggaaggaaagagagagaaagaaagaaagaaagaaagaaagaaagaaagaaagaaagaaagccagccaaggagaaaggtacacggtggtaggagaaactacggagtgtgtttggccagagatctttctgactgtgccatgcctcctgtctgcaggtcccgtttccacgcattaccgttaggggctggagcatggagagagtgggggtgagaacaggacagaaatagaagacacacgcctggccacagtggggacaggacaaacacaataagtattttcaaagcaaacataaacaagcacagatgaatgtagtgcaaatcaccactataaacagctttcagctggctgcacaaacggtgaatctgtgagttgattttgtaattaaaaaaatgtagaaatgatttccctgcagtcagccagcagcaagtggagaccagactctaactgagaccactgggggtctaggccaagctcagtggagacccaggacggacactccctcctccactccctctccaccttggacacagggaacggacaagtgtctgtaacaggtcgggtgctgtccacaacatttcctgtcaccagaatctccacactgctccaggacggcaggcggcatcatcctgcacagtcaaggaaaaggacgctcagagaagttcagaaatctgggcaggaccctacaaatataaaatgacagcaccaggacttgcacccaggtctgtagggagtatttcttcatggagtcatgcaacccccactccccatggagcctctgcgactccttccatgtgagcacagctagcggtggcagatgggtaccagggtctatgcagggtgctcagttgtgggctcagcttcagggtctcttgccctcagaactatggatagagcatttagcccaaagagagaacagaattttagctccaatcctctcagttcacagtttggagactaaaatccaggctggagaagggtcatgcttacagctatcatcagagctgggcatagagccctgtttcctgacccctccgccagcctctggtcctcagagagccacatgacaaatgtctttcgtggcagcacaaagagcagtcaaccgcccagctgatgccaccgcctccctgtctgtccacattctctcattgtgcagaaactgcccatgctacagcagctcccaggtggctcccagagaccttccccttagctggagccagcatccccaagctactgccacaagtcacaccttcactttcccatttgctagagccagcctcaactgtggcctggagccacagctccagttctcctgggctggtggcctctctggctgggcctgacatcccatcctcacccttcacaaaagcaagttccttactacccctgcttcctccagtgacacagcaaagatcccttagtgaaggggccatgtggctgccaggaatgtggggcaggaggctggccttcatgctagagaggtcttagacaaattgtttgctgttgctgcttctgcttctccctcttcatcatcatcatcaccatcatcatcatcatcaccatcatcatcatcatcaccatcatcatcatcatatctctctctctgtctctctctctctcactctgtctgtctctttgctggctctgtgatcatggaaggagcagacacttccctggtgtacctcagtcctcccatctgtatagaggaagcagtccacagagggaactgaggaggccagctcagcaatgcagagttctctaagtcaatacttctcaaactgtaatgtgcagggaataacctggttgatctggtgtaaatgcagattctgaatcagcaggtctggggcagagcctgagattctgcatttccaaaaagcccccaagggacactgatgctgtggatcagatccattgtccacattttgagtagcaaggctctaaagaacctggagacctgacatctgggaatagccatgagatgtgtggaccacagttttaagaaaaagaacgtctgcagctggaaaagaccttgggaatctggtggtaaaatgtcagagctgagggcccaggagctgtggccgcttccctgaggctggagcaatgctatgtcttgccccataggagccagctagagagcctgggtggagccgggtgctgtagctggcaccgtgaggtagaagaaagggaagtggagaaggtggatggaaagggaggagagaagtggagaagggcttgccccatgaggaggccagggaacaggggaccactggtcctcagttgttgccatttcctcccctgtctgccaggaaggcaccttagatcaatggaaaaccggtaccccagagattaaacatcagagcgggaaactggctcctccctcatatcatcagcctgtcttagtttgggctgctatcataaattactgtagactgggggcttgaacaacacacattttttaaaaacttttattttgcctggcgcagtggctcatgcctgtgatcccaacactttggaggccaaggcaggggatcacttgaggtcaaaagtctgagaccagcctggccaacatggtgaaaccctgtctctactaaaaatacaaaaattagtgaggcgtggtggcgcatgcctgtagtcctagctattcagggagctggggtgggagaatcacttgaacccaggaggcggagattgcagtgagccaagaaagcgccactgtactccagcctgggcaacagagacagaccctgtctcaatcaatcaatcaataaataaaaacttttattttaagttcagggatacacattcaggtttgttatataggtaaacctgtgacatgggggggtttttgtacagattatttcatcaccgaggtactaagcctaggacctattagttatttttcctgatcctctctctccttctaccctccaccctcgagtaggccccagtgtgtgtggatccagtggctgtgagagctggcttcctggcttacagatagccatcttctcactgtgtcctcacatcctcacatgacagagagagagagaaaatgagagagagtgctaccagacactcaccctgctgcaggctacagtgtggaatgcagatagtagcacaagacctgttttctttgggccatgtgtgtatgcaaactttaaaaggggcatcaacaacctgggggactgtcagaggagaggagcagcaggtcaaatgagagacacttggtagagcgggcatggacagcatgagtcccaacttcaaatatctgctgggctattgtgaggtgaaagaaccaatcttgctctgagtgtgtccaaggggttgaaccagcagcagtgggtaaagctcatagaaagacttgatttagttcactgtaaagcagaacttgttaaaattgaagctgaccaaagatgaattgcactgcctcaagaggtagtgagcttcccatcacaggaagtatacaagcagacactggatggacgtactacaaaagccacttgtatcagccagggttccaccacagaagcagaactggtaggagatacatattaagagatgtgttgcaaggaattggtgtataggctggtaggggctggcttggcaaatttgagatccatacggcaggccatcaataagggcaggctgggtcgggcgtggtggctcatgtctgtagtcccagcattttgggagtcaaaggcgggtggatcacttgaggttgggagttcaagaccagcctggccaacatggtgaaaccctgttgctactaaaaatacaaaaattagccgggcatggtagggggcacctgtaatcccagctactcaggaggctgaggcaggagaattgcttgaacctgggaggcggaggttgcagtgagccaagattgcaccactgcactccaacctgggtgacagagtgagactcttgtctcaaaacaaaagaagggcaggccggagctctcttcagtatgtgctaaaactgctgtccacaggcagaatttcttctttgagggagcttcagcagtactcttatggctttcaactgattgtattaggcccacccagattatctagaataatctcccaaacttaaagacaacccattatgaactttaatcacatctacagaatgtcttcacagcagtcctagattggtattggattgaacaactaggggctttagcctagccaagatgacacatcaaaaaggccatcacaccacccatatatcccactaagggtcacaataaatggcttttaagattcttcccaaccctgagatgctttgatttatttatcttcaaaggggcagcctggagagtttgagcacccagagtgggactcaggagtgtccttggggccctgaggccctctgggtccccttccaaattgaattggcttcagccttcctttcagttcagttaaccaaagatcatttgagatgtcccgaaatctcctgtgtgccaggcactatgtgaggcatcaagagaatgaaaaactaagacctagagccttccccaaggagccttgggtcagtggaatctgaaaagcacaagttgcatggtgcacatgctaaatccaagtacagtgacccaaagaagggtctgagaaggtgtccaggggtaggtttgaacaatgcgtgaggacttcaggaggtgaagatcagcagccagagctttctgcggtgagcatgacacacgccagggcatgagcatgcccaaggaaatgtactcgtgagcagatcctggagggctctggactctggtgtgtggacttgagtggacaagcactggaagacagaggataggcccgatctgtgtgcccctgcctgagtcctgaccagtgaatgccccaatgaccccagttgaagcagtgggtgccctgtgattccagttgaacccaagggtaatggtgacctgaatcctgattgcctgacttcccgcccaccctgctcacccagcagccctctgtcagcccccagggagtttttgactcccctatcccatttccttttctgggccaaagttccactctggagctcacaccaagtacagttttattgacggcttgcaggagcaccgggacggtgctaagctgaagatgatgctgccatccaacactgaatgcacagcttctgcatggacaaccccaggcccctgctctcagaccccttttctctcccacacaccctcccacaaatccaaatttctggatcccaagcgtaccctccttgatttctgctccgggctccgaggcttggcatggactcagtgtccctcatcaggaatgcacaggcctctcctaaccacaactctgattcagaaataaccatcttggaaacatcctgagagtcacattccagccctccagccataggaccatccggggctttctccagggaactgaactgtcaggccccagtggggcagcctggagagatctacacaggcactgagacaggggcaggcccgctcctccaggatgaggtctagtccccctgcccgtgcagaggagattccctggggctttgggggcaggcacggtacagacagttccaggcagggcaagcctccgatcaacgcaacagatggatctgccctggactgttccacacagatcttacccccaacatggagcagccgctcctcagggagcctgcctctgttaccacagtcatgaactaaggttggcattcatcaggaggttactctggactgagccctttacaggcattacctcatccaatcctcatggctgccctaggagggaggcactattttctttctttcttttttttttggaggcagggtctcactgtgtctcccaggctggagggtagccatgatcatggctcactgcagcctcgacttccctggctcaaatgaccctcccacctcagcctcccaagtagctggaatcacaggcatgtgccactacacccagctaatttttaaattttaagtagagacagggtctttctatgttgcccaagctggtctcaaactcctgggtgatcctcccatctcggcctcccaaagttctggaattacaggtgtgagccactgcatgtggcctggagacagtattattatccccattttacagatgagaacactgaggctcaggggggtcaggggatgtgtccaaagtcatgcagctggcaaatggcagaacacggatatgttaagcactcggtcatcgagtgtctctgagcctcatatcaaccccaaggtgtaggcatcattattcctactttgccaacaaagaaattggacttgagagataaggtcacttcctgcaattgagggtcagtgaacgtgggagccagagtccagtccagacttcccaaccttaacacctagcttctccccgacccaccccaaccacaagtgcccttgcccccttgacagtggcagaaaataggtcattcccgtagtagggatattagagatgtcacagagggttgtgttggcctatgaggggcaaaaaggcagcattgggggcaggggcagttgtcacagaatggccttggttcccggcctttgtccacaccatcccactgaacaggatgggaatctgagaccagaatggggacagagtgacggttcttaagagtggccactgagtggagaggaggccttgctgagggtgacttgggcaactcacctgctccctggtatggaggtaggggggtggggggcaggtcagacggcccttgtgtgctgagtagggaggttacccccgtagcagcagttgctggaaccagagtcatgggtgtgaggaccctgcccacgggagttaattcattagggctgaggtaagcccaggaggcttcaagtctgaaggaccccccaggcgattggaatctgcagcctggatctgggatgatggagaagagagcttgttgggatctgtattccatacttgggaggctgggccactcaccagctgctagaattttctttctggctgtccttggtgtctcagaaacatgcaaaggtggctgaggaagatctttgctcatcctcgagccaaagctcctggggtgagccaggtggccaagacatcaggagtcagtgggtggcccccagagaaggtcgtttcccctcccccccagaggaggagctggagagggcctcagtaggggtcctggggtcctggggacaggtctgtctttcgcttcatggctttagctctcactgcctgctctcaaacaaccccagggaaggtggtcagcccaggggaggccccctccactgggaacaaatctggggttggggccaggctgagccagggtgcccccttcttcagcatgactctgagtcatggattttccagcatgagggtcaggcaaagtaagaccctccagggcttcctggggctctggagcaggggctcctcttgtccttggtccacctccaggaggggccggagagagaaaacctggaaccaaactcagtgggcagccctcctcttgcatgccgtgcccagctaagtgccctggagtcccgagcactcatctgcctgggctccaaagaggccctgctgtcccctgcctgcttccagggggtgggccagtgaactcgtagaggcaggcatctcgtcctttcttgcagctgtgacgggccaaggaaagaggggatccagcctcctccactgctcctctgctcctctgctcccacctggctgtgaaacctggggcgagtcatacctgcccctggccttgtctgtgagggactgggctggtggcacctaaagcccttccagttggggccgtctctgttgcacctgccctggcctcccctccagccctcccgagaagcatgctacccaggattacgcttttgtccccgcttcaccccatgctgtccgagccctgaagagacttcctctgtgtctagtcccaagaatagagttctgtcaaggacctccaagtcaccccttgctggaaagagagcattcttgagtgtggccgaggtcctgcttatcagcacagcgagtccactgccccagcccctggggctgctggaatgcaggagcctcccacccggacagggtcagctgctcacggctcccacagtagtccctggaatggagtgcgggagggagcactggtgctgagggcaggctgatcccagccactgccttccgacagggagtggccaggagcgaggctgcagacacagttttgttgcaccccagctggcccaggatgtgtgtactggcagccagtcctgccatccaggccctgggcttgctccaaggctgccagggtaccgggagctgtgttctgctcatgcaccagccttcaacatttcaccttgaccagtgacccactggatcttctcagggtcagggcttagccctgggggtctccactgtggtttgatcactcagaatgttttggggcctggtgtgattccctgctacagagcctacacagtcatgtactcaacctttggccaggatggggtgagttcagggtgctgctgatggtccgcacctgcagagtagaggctcaggcagacagcagatagcattctggcaattcccagagtcctgcagatgcttcagattctttgagaaccactgatgcagcccaacccttctctcttccagatgaggggatgagacccaaggcagggtgcaggggagatgggcagtggcgtgcctccactacacagcagtccagtgacaaagcagtcctcgaactcaggtccccgactctttccactcccctcaggcacccacgcagtcattcctccacccactcggcctctctgagcatcttccctgtgtcaggccccattctaggccccagggactcagcagggaaaaagagcagcccctgttctcatggggccactttagaggaagtagagagtcaacaaactaaattatgttgtaaaaaataaacaacatcatctcaatggtaataagggccagcaagacaagaaagccaggggatgagagtgagagggagagctgccttccaggaggggcctgtagaaggcagaggtgggagaacagatttctgggcaggggaagagcagatgcaaaggcctcaagcaggccagtgccaggtgggttgaggaacaggagcagtgtggctgtggcatgctgagtgaagtgaggagaagaggcagaaatctgtaagggctggacactgcagggccatggagaccatggtcaagagtttggatttttggctgggcgcggtggctcacacctgtaatcccagcactttgaaaggctgaggcaggaggatcacctgaggtcaggagtttgagaccagcctggccaacatggtgaaaccctgtctctactaaaagaaatacaaaaaaattagccaggcgttgtggcatgtgcctgtaatcccagctactcgggaggctgaggcataagaagctcttgaacctgggaggcggaggttgcagcgagccgagatcgcgctattgtactccagcctggacaacaagagcaaaaactccatctcaaaaataaaaaaataaaaataaaagagtttggatttttaagactgatagaagtcactggaagggtctaagtgggttgtgatgtgacatgacttaaatttttacaagagcactctagctgctctgcaaagatcggatggtggcagtgcaaacaaaagcagggagactgccaggccacaggtcaccaggccacccgcaggtcaacccctccaaagagaggatggtggcggactggaccagcgtggtggtggtggagacagagcttgtgggtggattgagctatgtttgagaggcagaggagacagcactggctgatgggtacgatacatatgttggaggagagggctgtaggagttgggggaagagaacaatcgagaatggtcctcagtttttgacctgagcaaccaggtggaggatgtgcatttactagatggaaaagaacatccagagagtagcaggtttggtagactcaagacttctgtttcggatacccagcctaattttgagatgctcatttcaaatccatgaaggcagttagacagataagtctgcagctcgagggagaagtcaaagctgagatatcaactcaggagttatcagatagaaataatattgaaagtcatgcgccagatgagatcagctgggaagggggtagagctggcaagaagagcagagcgcccagcccttcctccagtgctgggaggtcaagcaaggaagggagcctgccaggagatgggaaggaggcctgggcactgtggtggcccagaggccagggggagtgtttccagagagggaacagtcaaccaagctggccactgcttagaggtcaaataggatggaaaccaccagtagatctgcagcatggcggtcaccggagacattggccatgaaagcagtgcaacattcaacagcttgctccaggagcgagggaaggggagggtggtgggagtcggcctgaggtggaacagtgaggccagattccaggagaggcagggaaagagcaactataccacagctcgccctattttcaggcctttccgtaaatgcttcacaccctccccctgcagagacccatgagggagttagccttatatccctcaagcaaatgaggcctgaggcccagcaaggcgatgggcgcagggctactgccaggaagccgagtccgggcctgtctgactccaaagcccccgctcttcctcagcagtccctcaccccagccccaccagctccgcctgccttaccctgccgccgccttccacattccctcccacctcatccatccttgtcctttgatcatttctgtcagcttccagccgtcttggcctctgcctccctcctccaggaaagctctgctttttctctttgatcctgcacgtctgtcctctgctgtgtcctcagctgggccccacgtccctcccaccctgtccttgcgagatgttcccgcaccctctgccaagggtggggggctgaagagtaaccaagagctttgcagggaacctgggcctgcgagacagaagtgtggcccctgtcccccgactgctctttgggaaagagcttggggatctttgggcctagctgggctcagcacaggggcccagagatgagatgcaagcgcacagtccatcgatgcctccagaggcagccaggagcgagctggcagggccgtgcctccttatcctgatgggtcaagaagggcctcggtgcttctcgagaagggtgcagatgaagagcagtgggcccaagtcctaaatagggagtggtagccagcaacacccaccggtgcctgccaccactcacacacaggcttcagagaagaggggaggggcttgggaactcaaagacccttttggagccaggtgactccagtgggaagtcatgtgcaaggcccacagacagtgtaggggggaagagggaagccctggcaggagatgggggcctgtccagcctggctccccttccctaccctggtctctgggataaaggaggctgtctgggatgtctgtagcagcctccagctctgacccttgggattctaaggccttgggattctgaggccctgctgctcccagcttctctgggagggcctggcacccgattctcagctggaagagatgaatagagcagacccaacacccagacaccacggaggtccagccgctctcccgaaagcctgacagggggctgcagtagtaattagctccccacatatccccggggttatttttgtctcattctcccctggtttatttttaaagtaacactggcacgtggctggccggctgcccttcccaggtgcctgtgccaatttgggccaggaatggagcagggcaaaatgtgccccctccctcacggtcccgccctgagtgccggagctaaccagcccctcactgactggctccaggggggttcttgctgcactgaagcccagagtccagcctgtggcaagcaggtgggctggcagcagaagacccctgggaaattaccacgtctctgtcatgaagctgatacacatgttgcctaaccttgaccgagtcacctcacctgtcccagcatcgcctcctcatttctcagtgggatgaatgaaagtgacattgccttactcaccgtgaaaacgctctgaagtgtgcaataaactgaactggtgcagacatcaaggaacagcgtgattaactcccatataaacatgctgccccgcactctcccactaagtcccctccaaggcacatctttctccctagaggagtgactcccagtctggaagtctccactccaatttctccctttcccaccagccctgagacctgccctccacgttttctgtttggctgaaccctaatccaggctgcctggagtgaagggaggcagtataggggagagagtatgagggagaacctagctctgcatttacttgctgtgtgatcttgagcaactgcttgacctctctgtggctccgttactgcatcttcaaatggggataataataatatataccaatagggtcgtttgaagattacacaacgtacatatattagctcgcttagagcagtgcctggcacgtagtaagcgctctataaatgttagctaatattgttttgaattggagaggaggatcagtgacagaggcatttaatcattcgaataaagtcaagtgcagagaaagccagcttgcccagattccatatcggggctggggggagggagcagggtagcactgtaagctgcagctggggggagctgggtcctggggagattgcctgggtcctcgggaggctgcccagcttggagctcttggcaccataaaaagcaagctcaggacaccagtgcataaacaggcagcctctatagatcacaggagccaggaagtcactctcctcttataccctggcctggctgatctcttgccaatgttgcactgtgaacagtgggtgcagagaagctggagggcttcaggatggccgaggccactggaaaggctggaaaatcagaggtcagaagagagcaacaagcccagggcaagtcaggtctcagaaacaggctgaggtgggtactgcctccctgtctccgtgtaaagggcagtgtccccgaggatggggacaactgtttgctgtctccacggaggacagactgagtcaagcaaccgaaggcttgttcacttcattctgcagaaagagcatttcctatagggtgcagggttgagtgagtatgtttctacggagagtggtggattcttagcctcctagaagagtctgtgtccccttggctggagagaagggaggctgaattcagtggcttctttagatccctaagggcctggagcttgtgagaacagtggaaggagtgggaggcccagaggccaggtcctgtgaggtgctgcctctccctttgtgcagatgtcccccttccctgtgtctgtccaccctataacctatcgggatggtgggcagaggcgtgcccagaggccacagtaggggagaggctgggtgttggagtgtgtgtgtgtgtgtgtgtgtgtgtgtgtgtaggagtgcgcacacacatgtgaatgttgggggtggggacctcatgtctgcaggctggctcggagggagagaaggtccccagcagctgcctccaggctgaagtccctgttgcctggagtccctctcttcctgggcactatgccaacctacaccatctgagctcctgagccctggggagggtgctgagcctaagaaaagcctcctttcacatctcctggcatctgcttccaaattccctgccagcccagagctgtctgggcgatgaccagaatggagagtgaggagcagaagatggagatggggccacacatgccccaagctccccccaccacacccaacccattcatcaagactagcttcatggatctgctagttttccactgtgggcactgggcaaggcaggccagtaggagaggggccatctccacgcaaaacctaatacctggcagatggtggtgagggcagaagatgccattctccggggagactgcgaaaggaggaggcagccctggggctttcattggaggccagaagagatgagggagggaagtcagggcagcagcgactccagtgactctgcagcagtggaagtgctcagaggcgaggcatgggacagatgggaccagaaatggtgagggagtcaggagaggccaggccagtagggcgggatcaggtggtggatggagagtccacttactggccaggaaacccccagactgtattgtgtggactgggggaactaaggaaggtttctgagtggtgaatggcaacacagagctgggcttagaaacatgtatgtgggccggacacggtggctcatgcctgtaatcccagcactttgggaagccgaggcgggcggatcccctgaggtcaggagttcaagaccagcctggccaacatggtgaaaccccatctctactaaaaaatacaaaaaatttgctgggtgtgtaatcccaactacttgggaggctgaggcaggagaattgcttgaacccaggaggcagaggttgtagtgagctggaggttacagtgagccaaaatcgtaccaccagcctgggcgaaaaagcgagaatccatctcaaaaaaaaaaaaaaagggctgggtgctgtggctcacacttgtaatcccagcactttgggaggccaagatgggtggatcacatgaggtcaggagttcctgaccagcctggcccacgtggtgaaaccctgtctctactaaaaacacaaaaattatccaggcgtggtagtgggcacctgtaatcccagctactctggaggctgaggcaggagaatcgcttgaatccaagaggcagaggttgcagtgagccgagatcgcgccattgcactccagcctgggcaacagtgcaaaacctctgtcttgaaaaaaaaaaaagaaaagaaaaagaaagaaacatgtatgtgttaataagagctcctactttgtgagaccctccacacgccaggccttgtactggacactttattttacatgctgtcttctaaccgcaaggtcacccagccacctagcaagagatgggctcagagaggcagtgtgggtggaggggaagcagcaggcccagaatcaagaggctggggtcccaggtccaactcaggagctgcaactgcaggcgacacacccaatctttccaggcttcggtgtccccgactgttgaatggacaccaccccgcccagtgagccacagggattcaacaggaatggccctgcactgctcactatgttggggacccctgggacacagtgcttggggactgtgcactctcaggcccaactgctgctggggaggggttgagcaggaaggatcaggaagcagagctggagagagcacccgcctgcctgtcctccccaggccatcattttccagaacaaccttaagaggagggatgcaggcaggatgcagtggctcaggcctgtaatcccagtactttgggaggccaaggtgggcggatcacttgaggtcaggagttcgagaccagcctggccaacatggcgaaaccctgtctctactaaaaatacaaaaattagccaggagtggtggcacacacctgtaattccagctactcaggaggatgaggcaggagaatcacttgaacccaggaggcggaggttgcagtgagccgagatcatgccactgcactccagcctgggtgacagagtgagactccatctcaaaataaataaataaataaataaataaataaggagggatgcatcaaggtccccttagatgggccatggatcctgatccctgggccccagcccagagaccctggaggccacatacctgtgtggccttgtccaaatcaccaaccactcactcagcccagtctccttagctgaaaagccagggcacctgccttctggcatgcagcatccattcaactaacattagttagactggacaaggtgaccggcctgagcttgtcccctggctcagacattcactagctgtgtgggcttgaatgagtcatggaaactttctgtgtctcagtttccttatctgcaaagtggacataatactcatctaaaatgtttgtgaagactaaataaacgaatgcgcagaaagcacttactacagtgtacagcgtctggaatacaggtgcttaataaatgtgagttttattattactacggctgcttttgttgttactaccaccattagctgctgtgtgccaggcactgagccactaagaagtacaaggcagtacccctgccctcgatagcctctgcgtacagacttacaggacaaaatgacagccaaaataaaaagcagcagcagctaaataaatgaaagaaagcaaaggcccaagtccccaagatcctggtctcctgcatgagatgagtggcagggagtagaggagaagctgggtaccaacacgattcccaaatgttctggcttgtcttggcatgggagactcaggcagggacacgtggccatctcctccctgactccatgtgcccctgagggccgggagggtgtaggggccgggtcggggattttccacctagctctgcctgcccctccgcttcagctggggaatgttacaatcagagctgggctggccaggccggccccaggtccctcaccctctccacagcatctgatcagtgcccaccaggactgtcggtctggcatacacccaaatgcccagtgttattgctttgggccagctgacattcccagtggcctttgtctgactgaaactattgctgtctccactgtttgtgagggagagaatgtggccctctgaaagcccacaatcctagaacgctgaagggcctcaagaatgtcttctaagttcttcatttcccagaagaagcgctcgaggcccagagaggggcagcgtcttgcctgggatcacacagcagcacaactagaaccacaccccaggtcttctgacttccatcttggtgtgaagagtcccggggcagccaagtgcagcagaaaaaaactgcctttgaatttcaagtttgattctaccatttatggcctgagatgaaacactgtctctctctctgagcctcaggttccacatctgtaaaataggaataatagcacctcctctaaaggacagcaatgcaagctcaaacaatagaatgtatagagattgctttgtaattgataaagtcctgcacaaatgaaatacaagggattattattctagaactcagagcacagcacatattaaggactcaaaaacacctgctggttggagtggagaaatgtttgaaggatgatgagtaatgaacaaagggcccctggagcactgatttgtttaggtgggtgagatcagggaaggtttcagagagggggtgacttttgaaatgggctttgatggaggagtagaagcccaacaggcagaacaaagagcacgagcagtgtccagaaatgtggaaaggggccctcccaagagctgctgacaccatgtccgcagccaggtttaggcaccagatcctgctcaaaatgtacccctctcctcagggcctctgcatggtacatggaataggagcaactagcgatttactcaatgctaaaatacaacttttcagggaagaagagacataagggatcttctaatctaacttctcttttgaaggtaggaaaaattgagataagaaaactgactcagataagtctcagggagctggcgtggcttaacaaacaccctgcagtaggcttagcaaactagggactatggactgaatctggcccaccacttgttgctgtcaataaagttttattggaacactaaatttgccatgcccattgtcacgtagtatccatggcttctttcttggttctatggcagagtcaagtagttgcaagagaccacagactcataaagcctaaagtatttactatctggccctttacaggaaacagtttgctgacccctgtcatacagcaaggtaatagtagagctaggatggtagccaggcctcctgactcctagtactttgtaattcctatgcaccatcaccctctgggccccgccctgcccccataacactgcccactgggtgagatttcaggcagccagactctgggcctacacctaggctggcctctgctgctcctcagacccaacagggcttccagttgggagaagttcattccctttaggagattgtggcaaggagataccaacacacccctgtttctcctcaatgggctcaacaggaaaggcctgggagtgtaaatgtgtaagactcgggccagccagatgccagcgtcatggacagggccttgaaaaaagcatgtgggggaaaactggcacctcagccatccgcgaagagggccaagtccactttaaattgtgctgtggaattcctttctcaatgccaggctgttcctggtggattcatttaattaaaaccccaccagatccaatctgttagaagctctgagctcacagatgccctgtccagctggtcatgaggatgcagacaggccacaggcctgggccatggcacctggctcaatggctagcttagaacaggccccaccggccccaggtcagggccctgcccaggacccccaggataactggctggtggtgtggcattgcctgctttagccctcacgctctgcttatcctctccgtctccattctgttcaaacctcaggctcatctctgatgcctccctctccctcagtcattcattcaacagaaattgatgaagcagcagctctgtgccaagcccccttccaggtgtgagggatccagtagcaaacaaaagagatgagaacccctgtcctcatggggcttacagtttcacccatgaatgcagggcatcccacacaccatgcatccactctcctcccctcgccccttcctgtcctctcctttctcggcccctcgcccctacctcctcctctcatcccgaactcttggatcctccgcttccctctagctcaggcctgagcacttgacaactggaccatgcagaggacctcagtggatccacctgcccccatctcccacagccacgcccctgcccagggttgccaggcattcagctcaatatctctctgagcacagccctcccctgctcaggagccatccatggctcctcattgccttaaaacgaagacttcattcctgaacccacccttgaaagcacctcaaattttggccccttctcaccttgacgatcttcacttttcaactgtacttcctgttccaagaacgccagaagaacttgtgctgtttttaggtttataatattcatcgttttctacttacaaaagtaatagttttttgtagtgaagaatttataagaggaaaattaaaattaatcacgagcccattattcagagataagctatatgagctttagaatatttccttacagctatatatgtgtgtgtactcatacaaaatgtatatgtgaatacacttttttttttgaaacagggtctccctctgtcacccaggctggagtgtagtggtgcaattactgctcaccacagcctcgacctcccgggctcaagggatcctcccacctcagactcttgagtagctgggaccacaagcacaagccaccatgcctagctaatttttcgtttttttctagagatgggtctcactgtgttgcccaggttcgtctcggattcctgggctcaagcgatcctcccacctcagcctccccaaatgctgggtttacaggcatgaacgagtgtgcccagccacatttttcatattttcatattagcgtgggatcccacaatatagaaagcgttgtctcctactcttttaatttaacatgatgtggtagttttctatgtaatcaagagactgttcaagaactgcactttaatggtcacacaatattccaccacataaatataccttaatatgtttaaccaaactctattggtggatatttggactgtttacaatttttcacaatgaaaatgctgctataaacatccttgttcataaatctttgttctgatctctggttattttccgagcagagattcctagaagtgccactgcagggccactgggtagacacatttctaagcttcttgattcgtatcatgcagctgcctttctgagagagtccgctggcccccacaccaaccccatttgtgagcacacccaccagtcccacgcaggtctattttctctgaccttaacacatcatgtgtcatcctaacattgtatccttgcctcagtagctcccctcatcagaaccctgcatttcctatccacccttcagagctcagagcaaatgtcacctcctccatgaagccctccctgataacccaaccaaagttctctatgtccagccctccttcggcttctgtcttaaatccctcctaaaacatttcccacctttgccatgcattttaataatttgtgtaataataacctctgctttatacagggcactgaagttttcaaagtgcttccactgagaggtttcatttgattcaatcccagatggaaagtgttttgaggtcagggacctcatcaatagatcatctaggtctatttctcctggctacatcaccaactcaagtccagcacaacctcaagctagcccttgtgtaacagaagtgtttcaccagcccttgttactccttggcctatcagaacagacttcaagatgctcccttctgcagcatagggcagtaaaagatgacatgagggccctggattccagtcctagctgtgtcactgagttgctgtgaccttgggctagtccctgctcctctctcagcctcagtttacccatctataaaatgagtggggggaagggcaccgtggctcatgcctgtaatcccagcactttgggaggccgaggcaggtggatcacttgagatcaggagtttgagaccagcctggccaatgtggtgcaaccccgtctctactaaaaattagccggatgtggtggttcacacctgtagtcacagctactcgggaggctgaggcagaagaatcacttgaacccaggaggtggaggttgcagtgagctgaggtcatgccactgcactctagcctgggcaacacagcgagattccgtctcaaagaaacaaaacaaaacaaaacaaaaaacgagtgggttgaactacgttgtcacaccaggactgatcgctcctaaggtccctatccccaggcacccagagcagccctggggtgcctctgagggcctctgcacaaagccggcctctgggatgggccagaaggagctggccagggaggcaggcctggctctaggccaggctgtgtctgcaaacactgaccttggctgccgcagggattttccatgacaccagcaccctccctctgagctccctgcatcacacatgggcctgaggagggtgggggatgggggctttgggggtttgtcctacatcagaggccccaagatcagtactagggccacctgtggatgggaggcagctcaaggcaagagaggagacagcagtgggcccaagagtggggagtccaggaggaagcatggggcagggagagaagctgctgggggtagtggggggaagagctgggagaggagatgggacaatgggaagagaggcctcgggaaggggcagggcagaagaagcggataggtgctgtgcttcagagctgtccttcccaggagctctggcctgaagagggacaaactccagatcccattctgtacattggtcccacccctaccccagctccatgagacccggtggttcccaggcctagctaggggcttgcccaggcccagtgcaggggggattccttctgaaccttgaagctgacctcattttgaaggggccagaggccacagtgaaggcaggagctatgagtcacccgaggccctcctgccaagggccacctcccgtccccatcctggatgtctaaggggtggtttctcatcaccatcccagacctcagagtccttcagaactggagcctctgggttctgcagccctcccaccccaggcctgtgctggacactgaggggacaagccagccctgcaggactcctctgtggacatgagtgcccaaatacagggtgggggcctgagaggggcagagggaggagaggcctcttcagtgcccagagaaggttcccagaaggttctcgggaaaggcagtgtctgagctgcatctcacaggaggagggagagcacctgcgccctcctcccgtctccaccaagctgcagcccctccctcctctcctcccccaagacctgggcacagaagctaggctccttccgcctcatctcctttaacatgccaattaggctccctcagagcctgcagtcccacttcctggttccacactgctgccatccccacaactgaggggcggctccatgtctgtgcctcaggcgcctgagctggttcctcgtgggccctcccctgggtgccctctgagcccagctgccctctgccatccagcaggggagcccagccttcctctgagggccctccctgtgtcttgcagcccccagagctgcctctgtctcccccaagcccgcactcctctctggctgccacaccaggcccaagccacactgaggtcacttcggcatcagcccagagttcacggcctttgggcacctcaggccacaggtccctcatccaccttccctcaggacaaacattagcccagccattgcctatttacattagataactaggtcagcctggagacaggcacagctggcattgccaagggctgtggtttctaatctacagaagggctgggccacccagagaaggagatcaaagaatcatatcgtcagagacctgggggaaggacctcagaggttcttgatactgcacaggagcgtttcccaaactgtgctcccagaaacacttgctcggtaatgtgcactatgagaaaagtgctccacggtcaaggaagtgggaagacaggcaccttttcctggccttgatcgaccttgcacatgaacacatacatagccctgagaaagcctaggctcaaatcaaatgatggtgaatcctgttaaattcagcatttccccaatttaattgagccaagcaactcttttctcatccaacagttgttaacattccatggaactggtatttcagaaaaataacttgagtaaacactgatcatagaatgttggcactgaaaggaactttaaagatcatcaaatcttggtgctccccaaaatattcatattaataattcatatttattgatctcaatgtcctaagcatgttaagtctatgaactcaatcaagtccccacaccaagtctatgaagtgagtacttcattattcccattttacagacgagaaaactgaggcacagtggattaagcagtgtggccaaagataaagttgtttggcttcagagcctgtgatcttctctactccactaaactgcagagatcctctccctgtgttcagtatttcaaacatacaacaataacttaactccatctcaaagagtcaattatctcaggctaatcagactttctgactggcagatgtgtgcttaattaattttgatggggaaagaaattaattatggttctaacaatgatttattcagtgcctgctctaaagagtatccacactgcactgatcaccacatcgaacttcataaataaaatcttccaaaattttgcctctgtgaatgggtgagtgaacagagaaaataataaaaggcagtgggaaaagctgggaacctcatctcttgccctatcttccatgtcacagatgaggaaacctgaggcccagaaggaacttgccaagacacaaagctgtctttgatcagggtcaggtcagaccccagatctcctgcctcctagccccatgctctttcctctgcccaaggctgtggccagcatcctggccttgtggccagctaggccaagggtaggaggtcaagcaagcagactagcaggcataggaggccagtgggaaacaagcagccaagcccagtccagccaaggccatgaccaagggctcagagtggctagttgtgctttgaatagaaggaaataagccacagggagagaaagaccagtaaaagggaggaccagacccaatcccactcccacaccaccatccccaccccgcatctccctggaagacagcttcagccagtttctgacctccttggtgattctgggaggaaaacagaggaactgaggtggcccagggtttgcctctgatctcttggttttcctgctgccctaaaatatttacactaacaattaatttttatgtccagccacctggcttccttaggtggattctgtgcctccagccagggtcccaggccacctcttagctgagttgctcccaagtaggagctgctgggccatgattgaatgaagaggccctggtcatacctgagctggagggcagtggacagagcattggttttagaaccaagtatcctgggttataatcctggttctggcattcacaagctgtgtgaccttgaacagattgctttccctctctgggcctccatttcctcatctgtacgatgtaaagactgaaccaaatgatggctaagggtatttctggatctgagaaccttaaaacctatgttggattcagggagaggaggctgggagaggaggcggtatggatagtcctggtagttttctgagaggcagtggccagagtctcccggtcagaacatctgctctggttgatcagcccagcaggtactgcgagagagggtcctcagagagtcagccacacagaaggacagatgcagcccctcacccagagactcgaaggcctggacagaggagagaagatagagaacaccttttgccccctgcctcataaagccaagcgcgacatgggcaaggaccaggcaggcagcgggcctgctggcaggcagacgggtcttgccaaactcccacttacttcccagaagctccagggccccctgggagtggctccacccagctggcacccctccaagttgggcgcccacgtcagcaggtcctcacactcccttgccctttcacccagtgacaatgggacaggcaatggggtggggggcaccctaagccggatacttggagaagcgtctgactgcctgagcatggccctcctgttaccacctctgctgcaactggctcagagcaacgcctgaggctgatgcccaagtgaaatgctctcctcccaaggcctcccggcctggtcgcccttcctgggtgatgcattggctcccacgtaccggaatgaatgctgagtcagaaaggcccagtggccttggccaacacccaaggcctctctggacttcatgacaccaactgtaatatgaagataatcataatagtgaccttgtaagaagtttttgaggattaagttaaaaatacatctgaagggtaagaacttattattcttaagcctcagcctgcggtaggaagtgagattgagccctgggggcatgtgaccccaaagaggaggcacatctaggccagggctgcctggacagggcagtggctgtggtggagcatgaggtgctgcctgggataagagcctctggttaagcctggatgtgtcatttgctttgaaagtcactaagttcaacaggatgaagggcagaggaaggggttgtcacttgcagctgaagctgggtcctgaggagctaggtctttgtgggctggggtaggagaggcgaaggagggccacgaggcagtgtgggaagcactgtggagaggaggggccggcttggctgggtgtgggctaaggacgggtctctggggtggccgcagggtatagcaaaagaagggcaaggaagggatgtgtggctccttgaagctgggcgctttgtgagcacagtcacagtgggcagtgaggctgccagacagggggcactggcttttcctaagagacggtgggcccagggaagtcacggcctatgacaaacacaggacaagggagcagtggtggcagagagggggtgagggcccctgatggtggtatgtgtctgcctgaccccacagagatggccctgcccccaggcccatgctctcaggtcacccttcccctgtgagatcccacgaccactgcttccatctcgcaagctacagcttccaaagagctctaacgcccagtctctcctgtgctcctgcagagggctctggcgggcagcgagggtgggggttaatagctctagctcaatcttccagagtgtaggaaagacaagtgagcccagagaggggtagggatttgtccaaggtcacacagctatcacgtggccaagctggggctatgtccatgctccctacttcctgttgagccccatccatggtgccatgccctcccctctccaccaagtagtgccggcctggaggacagggaaggacgggatgagaagcagctctggctcagggcctgcccagttgtcgaggtgagttgtggtctggctgccatggcccagctggcgggcacaatctgttctcaccctactggagcacagacgtcctaagcacagtggctctacagctcagctgtccaggtccctagcaaatggtgacacagttactggcccgacgctgtggagggggtcaggggagctggttctaagggcagccccaagcagctgtccccagagctccttgagctttaagatccaaatggccctgggttgacagaggtgccagctttactggaactgagctgccctcaagcctggctgctctcttggaaacatgacagtaatctggcacttcactcattattaatcacagtgagccattattgagcacttgataggtaccaggctctgggctaagtgcattacacacatgatcttacttattcctccccaaagtcctgtgaggcaagtgtattattaaccccattttatagatgtggaaactaaggctcagagaaatcatgcatacacacacacacacacacacacacagagagagagagagagagagagagagagagagagagacagtaagtccaggacagagtcacacagtatcctgccttgcaatttagttatcaaacatattctgggcctccataggtatggctggcaatgtggaggtagaagctagagaggaaagtgacaagacccatcagtgccaccccttccccccaaagctagtgtttagctctatgtagttggggatcctagaggacagggggtggtggtaatattggccctggaattacaagctgaacattttcagtgccactcaaataaggcagagatcataagctgtgaggaatccaggaggactgcatggaagaagaaacatttggttaagatttgataaggcttagaatggaagaaaatgccagcgtcattttattatcataattatgttaataaaagtagtaaatatatcaacaataaaagaagcaggccagcaccagtaaacacactttacaaatgaagaaacatgttcagagagtgggagtaatttgcccaaggtcacacagccactagggccctgtcactagggatgagttcccatccagggtcattttccctccagttagccggaagaattctcaacttaggctttggaatggctggtgcagagggaacatttgcctctgccctgatcttggctcagggtgggccagggtgggggcggggtacagagagattatctggctgatgatagtaacacacctggaaagacaccgagggctcctgctttgccaagggtaacaccacctccccatgaggacagatcctacatcaggtcaagtacagaggaagaccccaaggcctccagttggaggctgatggggaccctggaacactcattcatcctgctcttgcagggaggggcaggcagtctcctttcttctgtggcacagtgggccagctgccccagggagactgaagggcccttgttgccaagcaaccccacataagctttggctggcagcggggaatccaccaagaagccagccctgcctcagtctcccttcctgtacactggatcacaggatgtcagaaaccattcagggcaaccacctcaccttgtagtcaaggaaactgaggcatggagaggacaaggaccacgcccgcagcccaggacactgaactagaatccagctctcccagctgacctgtgccctcacactctccctgtgcctctagacaagttctcagcagcacccaggccaccccttctctaggcatacaaaacagtcccgtcattgaggtcaaacggactcgagttcaaacacggttgttctgctcccaagccgtgtgaccttggaagtcatccctccttatttcttccttcctacataccttctgcaggtgtcacaagagtacaatagaaagcatgagccagggcctagcacagtgcgtggggataaggagcgcccatcactgtggacccagacccacaaggtgggggaggtggcggggcaacggggagggagaagaaggtttctggaagggcagccccaaaatgtgtgctttttctcctctttcccactttcccccaggctacgggcacgcggcacccagcacggatggcggcaaggtgttctgcatgttctacgcgctgctgggcatcccgctcacgctcgtcatgttccagagcctgggcgagcgcatcaacaccttggtgaggtacctgctgcaccgcgccaagaaggggctgggcatgcggcgcgccgacgtgtccatggccaacatggtgctcatcggcttcttctcgtgcatcagcacgctgtgcatcggcgccgccgccttctcccactacgagcactggaccttcttccaggcctactactactgcttcatcaccctcaccaccatcggcttcggcgactacgtggcgctgcagaaggaccaggccctgcagacgcagccgcagtacgtggccttcagcttcgtctacatccttacgggcctcacggtcatcggcgccttcctcaacctcgtggtgctgcgcttcatgaccatgaacgccgaggacgagaagcgcgacgccgagcaccgcgcgctgctcacgcgcaacgggcaggcgggcggcggcggagggggtggcagcgcgcacactacggacaccgcctcatccacggcggcagcgggcggcggcggcttccgcaacgtctacgcggaggtgctgcacttccagtccatgtgctcgtgcctgtggtacaagagccgcgagaagctgcagtactccatccccatgatcatcccgcgggacctctccacgtccgacacgtgcgtggagcagagccactcgtcgccgggagggggcggccgctacagcgacacgccctcgcgacgctgcctgtgcagcggggcgccacgctccgccatcagctcggtgtccacgggtctgcacagcctgtccaccttccgcggcctcatgaagcgcaggagctccgtgtgactgccccgaggggcctggagcacctgggggcgcgggcgggggacccctgctgggaggccaggagactgcccctgctgccttctgcccagtgggaccccgcacaacatccctcaccactctcccccagcacccccatctccgactgtgcctgcttgcaccagccggcaggaggccgggctctgaggacccctggggcccccatcggagccctgcaaattccgagaaatgtgaaacttggtggggtcagggaggaaaggcagaagctgggagcctcccttccctttgaaaatctaagaagctcccagtcctcagagaccctgctggtacccagacccccaccttcggaggggacttcatgttccgtgtacgtttgcatctctatttatacctctgtcctgctaggtctcccaccttcccttggttccaaaagccagggtgtctatgtccaagtcacccctactcagccccactccccttcctcatccccagctgtgtctcccaacctcccttcgtgttgttttgcatggctttgcagttatggagaaagtggaaacccagcagtccctaaagctggtccccagaaagcaggacagaaagaaggagggacaggcaggcagcaggaggggcgagctgggaggcaggaggcagcggcctgtcagtctgcagaatggtcgcactggaggttcaagctaactggcctccagccacattctcatagcaggtaggacttcagccttccagacactgcccttagaatctggaacagaagacttcagactcaccataattgctgataattacccactcttaaatttgtcgagtgatttttagcctctgaaaactctatgctggccactgattcctttgagtctcacaaaaccctacttaggtcatcagggcaggagttctcactcccattttacagatgagaatactgaggcctggacaggtgaagtgaccagagagcaaaaggcaaaggggtgggggctgggtgcagtggctcacacctgtattcccaacacttttggaggctgaggttggaggattgcttgagcccaggaatttgagaccagcctaggtgacatagtgagaccccatctctacaaaaaataaaaaattaaccaggtgtggtggcacgtgcctgggagtcccagcgacttgggaggctgaggtgggaggattgtttgagcctgggaggtcgaggctgtagtgagccctgattgcaccactgtactccagcctgggtgacagggcaagaccctgtctcaaaaaaaaaaaaaaaaatggcaaagggagacaagagcccagcctgcttgttgctagccaaagtgttctttccttccagcttggcctgctcttaaaagcaaagctcctgcagtgtacatcctggcattgtgtggctacctgggttttaaaccagaatcagaagtcccggatcagagggcactgctgaggttcagcctcttctcttcttggccaggaggcagcagctctgaatgggcccctgaggctgcacaggggcctttgtcactggggcgcatgcttacaaacagtgcagttcttgggaccgaggtaagcagggctgggtctcatggcagaaaggccaggatctggggctctaggaatttgggaattgggcagagtggccaagaaagctggcaggcatatcctatgggacatcacacctggcaccattgtcattgttggtgcctgtgtcccaagtagctagtgataagctgaggctgcagcaagaaacacccttcccaggtgggggagtttggaccagaggtgccctctgcccaccacacctgcaacccagaagcccagatggaacgcagctgacgaaggtgatgcttgaggctcacttttggggccccacagctggagccggtataatgactgggacaacatcaaggggtggatgaggggcctctcctcccgcaacactgccttcccatgctgttcccctgccagctccttaacactgccgaccaaggccagccctggcattcagggaaattggagggcagcacccgtagggtggccagcctcaggccccaccccagctgtgtcctctagtctctggggacccctggggggaagaagtctaccctgcttgtgagtcccgtctcagtgtggaggaactggctgcacgtgggacctgaaggtgccctctgtgtttatgttgggggtgggggggcagtgctggctgcctctgtcctgtgtgtgaccctgccctcgaagggtcctgtcctgtcagtcccgagggagccacaaccaaagctgcggagagaaggtggggaagggtgcagaatggccgtggggcacagcgtggcagactgttcagtctctgctgggtctttcctagggacctggaaggccagtgttgcttccccctcactccctttcactgcaggcagcctctctgcttccccaatgccttatgcctgggcacactgccacagaatatgcaatatgtgtgggtgaccatgccctcacgaccacacccccaccccgggcagcccccggactccaaaggtcgtggctgccacagcctccctcagctcttcctgcctatctgtcttcacactgagaatggcgcccaataaatgctatccacggagaccaggctcaggctccagctgcctctgtcatcgtatgcccttgctgctgccagggaggggccatctcccaccccctcccctgccggggtctacaaacatatctagctgctgggtgccgtggctcacacctatagtcacagcactaggcgggcagatcacctgaggtcagaagttcaagaccagcctggccaacatggtaaaaccccgtctctactaaaaatacaaaaattagctgagcgtggtggcgcatgtctgtagtcccagctactcggctactcaggaggctgacgcacgagaatcgcttgaacccgggaggcggaggttgcagtgagctgagatcgtgccactgcactccagcctgagcgacagagtgagaccctgtctaaaaaaaaacaataataataaaataaaataacatacctagctgactcgccatgggctcgctggcctgtgggcgacactggcttcccttttgggatttcccagaagatccagattttcttaagtccccttggaacagactaagaaaggatcaccttagaaatcacctggtcctattgtcccccccgtacatgagtaactgaggcccacagagagcaaatcgcctgcctgagtcacacagcagtgagtggcagacctaggctaggaactaggactggggattgctattccagtgctccccatcctcacacagactgcacagtccgcctggacacaccccagctgacagtggtacctcccagtcagccaggagaatggattccttctcctgcagtaggggccccctggctgagtggcctgattgactaaaacatatgtctttgaaggagagtgcatcacaagcacctttctttggggtagatttttctctgggtctagagggacagctcaggcttgggactgggcctcagaacctacgacagaccgtgagagcagacccaccttatccatctggtgccagctccccaggtcagctacagcgacccccggacttcatagagtacaatccacagtaatagcacacagctctgtacctatctagctccatgcctatctatctgcctacctttcacaaaataattcttagcaaccctgctacagccaatgattctaatacgttctgttctattgcatgttataaaatgctggtcacgatccactaaattgatgtctctacctgctaatggtttaatacctgcagattgaaatatactggagaaataaagagagtgggagtagggacactttctcccagtgcccacaccgcccctcgttacccgcataggtcaactgaaagatacagagagggaagctttgatggggggttcagagttcaaaggaagaaatgatggcacctgcactccctgcccccagaggcaggacacagccagccctcctgtgacagcactcctggcagctccttgttggcctgcagccctcagggggcttagttgccattgactcacccactcctaaggccaccacatcaaaatctgaggcttactgccctgtcccacctgcctctgtctttcttaaaacagctaaatgcaacaatagcagaaattagcttgtttttgaggttggcaatgaccagttcaaggtgactcttattttcttaagcagtgcttgcaggacataaatgtgatgacacttgccctcctttctttatcgcctgggacagactttacaaacagacctgggagaagtcccctaaggggctgcatttatccccatctccctaggggtgatcagcattgtgacagctgggcagagcagtggtgaactgcacccatgtccctgctcacatctcctaagatctcagaattgcctgaggttctagcgtgggctccttctctccagatgatgccatccccacccccctcatttccacacagcatctgaggcatcctgcactaaaagatatatgtacagcaaaacaaaaatagaaaaccagcacagcagagtggaggtggggtataaatatacccagatccccgctgatttggttactcggggtgagcatcagatggaaatagaagtttccgggggccaagagagaaagagggatgtaacgacaattcttttcaaaacgtgtcccatggtatgcctcgtggaaaaaatggttcgttggtcaaatgaatttgggaaaatgctgtcaatatcaccgactcatggagcttcgcaaggcatcttagcttaataaaggttatgaaaagtcttgcagcaaagatgctgtttacccctgcttaatccagcactgcccaaactcattccaaataccagagcctctgtttgcacgacatctctccgagccctgtatgtcacagcacatgctttgggaaatgctgatccatcgaaatctcactgatgaagagagaaggctgatccttcctcctcaccccacactaaattataaaagaagtttagcttgcaagtccttctataagtgaagactacaacaatataaaatacatatgttattctcaattgcgtgccagattcgaccaaggctcaaagcagcccgcttgctcaatatcaggcagtgaattgatggcaaagcggggatttgaacacaggccgatggctgcgaggcatatgctcttacccacctgctgtgtactgtcccatgatgatccacatcttcagcaaaggtgtggcagaagttcagagctatttatgatgtggtcatttcttattcagaacctcggtgagagaggaggctgtaatctaaagatgtcatccttcaaagatgacagattccattggagctaagaaatcctattctggccgggtgcgatggctcacccctacaatcccagcactttggg

SEQ ID NO: 10 - DNA, 4258 bp, Homo sapiens
gtctacacaaggtgtttttttttacagggtgatgtgcacacggtgggtccctctgggtggtcccacaacagatgaggggcccagcctcacccatccatgaatcctggagactccagacttcccatccatccagggttctgcagccctctctgaggctggagccaatctccccttccgtcaagggatccggggagaccgccaagcccggtgctcccctgagagtctctgagaggccccgacaccgcccccgctccaggtccccgggatgctcgcgcaggcgggagcccggggcgcccgggggatccctgagcgtcacgccgctgttgtggagcgcgtgttgacaacgtcgccggggagacgggcgggggcggggcccgggagagggggaggcgcggccctggcggcgcgcgaggggccgggctgtcagcgcaaggcccaggccgccgcagtggccacggccgctgccgcccgccggcttatataccgcggctaaatttaggctgcgcccggagctcgtccccatccgggacgcgtttccgccgccgccgctttggcccggcccccgcgcgcgccgcgcctataaggcttgggcgggcccggccgcggcccacagagccgtccccgcccgcccgcgccccgaccagcccggcctcgggcagccactcaccggtgtccccgtccgcgtcctttctccccgggtcccggccatggcgctgagtgaacccatcctgccgtccttctccactttcgccagcccgtgccgcgagcgcggcctgcaggaggtgagggcggcggggacggcggggcggccgggaccgtgggcggcgggctcggggtagtagaacgtgggctgcggggtgacaggacgcgaaggcggggactgcagactcaggagaggaggatgcgggccacggggatcgcggacttagggtggtaaaaggcaagcagcgccccccgagccccgccgcccgctcacgcccattgccctgtcgcccgcagcgctggccgcgcgccgaacccgagtccggcggcaccgacgacgacctcaacagcgtgctggacttcatcctgtccatggggctggatggcctgggcgccgaggccgccccggagccgccgccgccgcccccgccgcctgcgttctattaccccgaacccggcgcgcccccgccctacagcgcccccgcgggtggcctggtgtctgagctgctgcgacccgagctggatgcgccgctggggcccgcactgcacggccgctttctgctggcgccgcccggccgcctggtcaaggccgagccccctgaagcggacggcggcggcggctacggctgcgcccccgggctgacccgtggaccgcgcggcctcaagcgcgagggcgccccgggcccggcggcttcgtgcatgcgaggtcccgggggccgccccccgccgccgcccgacacaccgccgctcagccccgacggccccgcgcgcctgcccgcgcccggtccgcgcgcctccttcccgccgcctttcggtggccctggtttcggcgcgcccgggcccggcctgcattacgcgccgcctgcgcccccagccttcggtctcttcgacgacgcggccgccgccgcggcagccctgggcctggcgccccccgccgcccgcggtctcctcacgccgcctgcgtccccgctggagctgctggaggccaagccaaagcgcggccgccgctcttggccccgcaaacgcaccgccactcacacctgcagctacgcgggctgcggcaagacctacaccaagagttcgcatctgaaggcgcatctgcgcacgcacacaggtgggcggcacgcacgagccaggagcgcaggcggggggacgcgggaggagaggtcggattcccagcgcgcgccagaaaatgaatttaggacctcccttggggcgtggctcagggggatctggcaggtggtgcacgcttaggactccccaggaggcgtggctcgggaggttggttgggggggcacacaggaacactccctaaggaagtgtgatccgagaggttggggtgggggcttgcacgcttaggacgaggggggcctccggaggttgggaagagcacttagaaaacctcctggaggcgtggctagggagacagtctcagaaagttggggagggggagcaggtttaggagccgctgggcacttggctcagaatccccggggctgaggctcaggtagttggggagtaggtgcgcgtttaggaaccccggggagatgctgcgtctcaggaagttggggagggcgctcaggcttgggactcctctggggacaaggctcaggaccttggggagggagtgttcgctgggaaaccttgagagattccgtgtcttagaatgctggagagagggtgcatgcttaggacccgtcggggagcgtggctgacaacagtggggagtggaccttgcgctcctccgaccccctgggggtgaggatccggattgtggggggagttggggatgtagggcaaggatccctcaggggcgcaacactaccgcggggagcgcgtcaaggccctggttagggataggttgcgctcgccggggtagccatacgtgccctgtcctgggaggggaactgacgcttactctcgccccctccctgcaggtgagaagccctaccactgcaactgggacggctgcggctggaagtttgcgcgctcagacgagctcacgcgccactaccgaaagcacacgggccaccggccattccagtgccatctgtgcgatcgtgccttctcgcgctccgatcacctggcgctgcacatgaaacggcacatgtagccgggacgcccccgcccacctgcgcgcggccgtggcgggtcccacgcgccgggcgcggccccctcccaaactgtgactggtatttattggacccagagaaccgggccgggcacagcgtggctacagagggtctccctcgatgacgacgacgacgacgccaccaccccagcccccgtctgtgactgaaggcccggtgggaaaagaccacgatcctccttgacgagttttgtttttcaaaatggtgcaataatttaagtggcatcttctctcccaccgggtctacactagaggatcgaggcttgtgatgccttgtgagaaataagggccttaatttgtactgtctgcggcattttttataatattgtatatagtgactgacaaatattgtattactgtacatagagagacaggtgggcatttttgggctacctggttcgtttttataagattttgctgggttggttttttttttaattaaaaagttttgcatcttttaaaaaaaatcacagcactggtctggttgcttggaactggggccttggggcacttgggaggaggggggagcggagagtttgatggagggcagccccactaaagcatcgtgtgcagtgggtcctgcgtctgccagcaccgggactgccagctgctgtgcctgcctgccaggaacctgtgggtttttctgtaaatttagacactgcattttaggactgagggagggttattttaaggttgttctttgagccataaattgcctctttgccccacagctggggaaagtgctggtcccactgacgtggcctcctctacgttgaaaaaaataaaactacttacctcttcctggaagcctctgaggttttagccaaatttctggagtgccagctctatatttttatttttatttttaaagggggttaacctgctgagtttctggcatgttctgccctttactcgtctcgacatttagcaagtcttttcttaaggggtgagttccccattctgctagcggaaaacagtgaaacctgcattcgagggccatgcatgaagctcttttccagatgaggaaacggaggcccggagaggtagcggcagggtggtggagttgggttgttagcctgctctgtctgcctccaagggtccctgaaccccactggaagggagtggtagctttctacaatgacccacctgttgtgtgcattggaaggctaggagagcctcctcccctgtaggtctcctggtgcaaaaaattcactgcctcaatggtaggaggtgaccagtctggaaacccacctggagagcagaggagacccctaaatcccaccaccccaagtgtctcaggcaaggaggtatctctccccccagatttcacctgccacccctcaccttccccattctcaggggccccgggtaaccatgaccaccaaccattgcacaagtttccagaaa

SEQ ID NO: 11 - DNA, 78086 bp, Homo sapiens
acgttttgaaaggttatccatgtagcatgcatcagtatcagtacttcattcctttttatggctgaataatgttctcttgtatgggatactttatactatttatcaagggagggttttcaacagaggagtggcctgatccgagtggcatttaacaaggttcactttcctgttgttctaaggagcagagaatgatcaactgcgtcaaacgctgcttttagggaaaataagatgaggcccacgaattgaccagtaagtgctcaaataggttaagggaaaaaggaatttaattagaagacatattctgatatacattgctgggagtgatttttttttttttttttttgcttcatgtgaaatttattcctcaaaaaaaaatcattttttctaaacgtaactcaacattatagtaattatgcaagattttatgcagcttcaagagttagccaagagaaaagttgactcttgcaagaagatattttcaatgtctatgcagatcaggtaggtaagagttaagtgcgggggagttggcatcatctaaaagactgtagaaattggaccaaaaatgtggagttctaaagcagtatctccttatggcatgccattatttggagcaacaaggttacctactcgaatcactggatcctgagttgacacaaaacgcatctgttgactcagggtttgtataaccacgtgcagtatttactaggctatccaattctgggtacgtacaacttctggggcctgcaaattattggagagtgagtgaggggcaacgaaagatagacataaaagggcgcgtctcgaaaggtaactgtcaacatgcactccacgtttatagaacgattcagtgggcgcggtggaagcgttaatgaacatttcagaaaataaacatatggaacatcgaaattcacttgcagataatggactaagtccgctccaccgggactaaaaaggcagggttaggaaagcctgaacgccgccacactgttttttctccaggaagaaacggggcgtggggctgccggtagaagggggtggctccggccgctcccccgcgccgtcctccggccccggccgcgctgcgctcacgccggccgggccgggaatttggagaggatccctggtcgcgcggcagcggcggcggcgcgcgggtgagcgggtgagcgtgtgagcgggcgggcgggcaggcgagtgcgccgggtattggcagctgaggagtggaggctgggcagctccgactccctgacgccagcgcgaccagatcaatccaggctccaggagaaagcaggcgggcgggcggagaaaggagaggccgagcggctcaacccgggccgaggctcggggagcggagagtggcgcagcgcccggccgtccggacccgggccgcgagaccccgctcgcccggccactcgtgctcccacacggacgggcgcgccgccaacccggtaaaacgaaacagacccgaaccgaactttcccttcatgccgcgtcccagccctcccctcggcgccccgggctttccagcgccgccgccgccgtctctgcacgcgtggggccgccgcggtcgtgctgggctgggggcgcgggcagcggcgggaagggggctctttctgcgcggggcgggccgcgaccccccccccccatgatggcgcctcccgtctgctcggaggagcgaacctgctaccacgtcttctcgcgcccagcccgccgggctcccctggtgtctttgttgggtcttctgctgtgggaagcccagttcccgggcccccgagcctcggctcccgggcctgaccgcgctgggatctccccggccgcgctccccttccgcgcgctcctcacatctctcccgtgctgccgccgggccgaggcccgttcgcgtggcccgcggacccattgtgtcccccgcgccggcggggcgacccctgcgggagctggaggacgaccgctggcgctgctctccaaggcgcctggtggagcgggtctcgcgggcgggggaccccggcgccccgggcccctccacatcccgcacgggttttcttctcggccccagcaagcctctttggggtcgaggtcaaggaaagttcgcaccgagatcccctctaatttattcaaaggtttggcggcggcgcgtaattttttccccctcttccgcctacacccgctgcgtctcctggtgtctcgttcctttccctttaccggagtcgattgcctcactgcatgtgtattcgtgagttcgcggttgaacaactgttcctttactctgctccctgtctttgttagtgtttctcggggttgtttctgtaggaaggtgggggtggtgggcgtgagagacagatgtgggcttgtttttctagttgctgaaactgtatgaaggctttaaagggagaacgttttcttgatgtgctttaggaggggaggaggaacaaatgcctgccagatctcacagctacagtagctgagcttttgtttattttgaagagcatgcaatttttaaatacacggtgcaagataaccagtaaaggcgcgttccttctgaaaattgaggccggtctcagaaccatctcctgagaaagcatccttttcgtgagtgctgagacaactgtcctttttctctgccctcccccctcttttctttccattgtatctgaagtttcaaagtacgtggaatgatacagaagttgcatgatttctgttatttcttcctgttgctgaaactctcagccgctaaatctcagaatgcctctatttcagaacatctctgggtctaattgcctgttgtggataacttgcccacacctcagtaacacaatgagaaaactgttccctgcccatgttgatttttcaaattgtttgtaattactttaaattgtattgaaggtaggtggaccgtgttaaaaaagaatcggaacagaagtgttcactgccccagcattttcaattggtataaatattgttgcatcagtgttattctgatgtaggtgccagatctaaatatgctgtactgattaaagtgtttgttctgccctctcccactctctttcccatttgcaattatttgctatttctgtgcaggtggtgtatcattggtgtaatactgcagttcttaggaaggtgtagctagggtcgtgagagatgatttttctggaggtgggtgatgccagagcctctagaggatccaggcaggatcgagtttcttctgagggtagggatttgtccttgatttagttttgacccctacaaccataggtatgtaaccaaatacattttacctcttgcagtatcctttggtttcgtatccttgaagagctgatgacctttgtgttttagagaaatgacaatttttaggcaattaaagacattggcctcttacacttcttggaattttatgttatttttactaagttcattaaggcattaagaggaagttgtcacattttctcaactacgtttattacatttattagttaaaaactaaatttcactttgtaattttgatttctagcaattctgggttaaatattaaatctaataacctagtagattggaaaaagaagtagcttgggtatagtaattagactagcatgtttaagctgcagtagcctacataatcaaggccaagtgtgtgtgtataaaagatctcatttgtgtagtcttacaaggctaatggaggcatcactgaggctttataaataatgtaagttgggtataatgtagagtctccagagacggcagagaaagcatcattaccagccttttcaacctgcttgagatcttaaattgatttacagcactgaactggtgcaaaatgatacatcaggatgacatggggtcagcctgtaaaagtctatgatgtcagcctattagttcagtcatcataattaaaccatattacaggggtagctaagcaggagtctggcgttatacttcagatatgggtggtacatgggttttgtttatagtggaaaggctgagatggccagggataccagtgtgtgtgaaagagggaaaaggcttacagaactatgaatttctgtagaaaaatttaagataaatgcagagatattcaatctgaattgtataagtagcttttcatttggtagaggagaaacagatgctttagggatgctgataaggacctttgcagctctgatatgtgtactgaatgcttcatgtgagtttgaatttaacttggccttagggaccttataaaatatcagtggaccacatacttaactttgatccttttattacccctgaattttcactgtattgatatctactgacatgttatttctttaactagtcaaacttaccaggcctataccagaaacaaagatatttgaattgaacatataaacagttcaggaaaagaagatccttattttgcttaagtttctgacaatccttatttagcttatggattatctagggctctgctatcctagccatagtcacacgtagctttttttgaaattttattattctatttttttgagacagggtctctctgtgttacccaggctggagtgcagtggcacgatcatggctcactgcagcctcgacctcccaggcccaggcagtcctcccacttcagcctcccaagttgctgggactacaggcactgccaccatgtctgcctgactaatttgtttttgtatttcttgtagagacagggtttcgtcatgttgcccaggctggtcttgaactcctgggctcaagctgttctcccgcctcggcctcccaaagtgttggggttacaggtgtgagccactgcactcggctacttatagctatttaagtttaaattaaaattaaataaaaattcgttttctcagcagtagccgcatttcaagtgcttagtagctgcttgtggttagtggctgccatactggacagcgtgtatatagaatagttccatcatcacaggaggttctgctagccattgctgccccaggacctttacctcttctcacttgttaactctactaatgatttgtggagtcaaagatggaaagacatatataaactaattttatcactaactagctgttctttttaaaataaaacacaatttggaagggacagttgaagctgctggataaaaggagtttgacttttctgtagatcttatttattattagtgtcatcgattctaatttggtttagagccttagagagaagaaataattgtagctaacccttttttctgaatttttactgtatgtatgccaggcattgtttataatacccatatctcatttaagcctcaaaacttccataagtactattgttgtcacattttacaggtaaagaaactgaggacagaatgattcagtatcttgcttcaggaggtacagtgaatgattatgatttctaatcttacctgggatatgatcgaggcagtccaactctagaaactccatcttaactatgttttttggtctttcgttcagaagacccaaatcatcattgttctgctgtgctttactatgccagtatagacatgacttggcttgtgtattttgtaggtctttaaataaatttaccttctattgtgcctttctgggctatcttctgtcgttcttttgtaagtgtttaagaaaggaaaaataatgctcatctaagcagcacataatttgaagaataaatctggcatgaaaataatgcatttcaaagccaaattagttttatctctgcttttctgcataattcttgtcactttcctcttgcattttcttacataatcacaaactgatattaagttaggaggaaagttgtagtaattcagtttgtctgtcttaccaaaattagtctatcttccctgagctgttaaacactgtaagaatagtaattgcaaattcattggggatttttaaaaaaacattcaacatctatttttgtaaatgttttacaaggtcagggctgtttaagaatcgatgaaactatggatcttgtatcttcttattcccaccttcctatcccaaaatgcttatatgtcatggtgagttaatgtgtacacttaactatccaaatctcatggtctttcgggtgaaatatgtccatgggactgccaagtgctttcataaacattaagatttgtaatttcctttacagagaatagagatacttagtattaaaagttgctttaaagattttctaatctggttggttcatatcaaggtgaacagtctgaagtccagagaaggtaactgacatccaaagttacctgtctagtgattggaaaagggaaagccaagatctggactcctcttggcattaagtgcccttttgttttcaggttttttttctccctaccacgctcacgatatttctgaggctttggtgtaagcatatccagtgtaatttagggaagggaggaaagaattttttggcctgttagcaactttttatacctaacattgtttgagctaagtaggaatcaaatctgacaaccagagagaaatgcttattttctacatattaaaattgattctttttcattctggagatggaaaagaaaagccctatatctaatttaatcaatgagaccttattagaaaatgggagatccaagattgcacaaagttcaaattaaagcaggcaactctgacatctagcaaaatatacgaatctcctcttgactctcgaaaacaaatcacattcctaaccaaaagctaaagtttggggtatttagggagctagggagtcctagggagagaattggacaggtctgaggagaaaaaggataatttaaatataaaaaagtggaaaaaatcggttttaagtcatagcatgtctttgaggttgatgaaatgttctgctacttctatatgtggttttactctttggtaccaagattttaggacatactttgataacaaataggggcatgtcctctttgccccaatctgaaacctcttgaccctttattttcctttcctgctgttatctggtagtacaaatattcagtctaatctgttgatctggcatctgatttgcagcaaaaatacctgaagtattttcatcactctgctgtagccacctttaaaaagaaaaggaaagagaagaaaaaggcagagccaaatagtattaatgtaattgcttaaaatctaaattaaaatactcatcttgctctgcgttattaagatggtgtcagttttagaggtgcagggctagtcctatatgcaaaacagtaatgtctgtagctattgcgggctgacttgcagaaatgagcggcttctctagaacattcatttgcataaaggaaactatctttcagaaaagaaaagccaaaagtttcataagcagtttcactccagtgactacatcagagttttagtaaggtactgggaactacagtatttgaacagttcagcatctttataatttttgttataagctaaaatctgaactttagagaagactctctcttgaaaataaagcattaaattctctaaggtgtgaggaagtccttacctggtgattttcccaaatctcttttatgttcttagtgtttgaaaaaggaacttttttttttttaataagaacctaggtttgcagtatagattggtttcttaacaaatattttttttgagacaataagcctggatctgaagaaagaacatacaattgttaattatgcatgtatatgcttttgagttcaggatgtaaatgaatattcactaggtcctgtttgggaagaggaggagagaggggtctctctgttgattcagaatatatttttatacataagttttaatgctttatttgtagtttccccttaattgtagggctgctgtactgtggatattttgctctacaatctgagattgttagggtatagttactccaactattcatgtattatcctctccctgtctttttgtgtgtgtgtgtgtgtgtgtgtgtgtggtttctttgtggtgtgcttatgcaaagtagaagtattccagacctttatagcttttttttcttttagtttcaaacacttcaagaaaaaaggtgggggggagactctctcaacggttataattaggcattaattaagccattattcagttaactaaatgcaagatcttttgtttgtttagatggaaaagaaacgtatctttttaatgaaggagggatattaaatgggcccttatttgatcattttgctgcagtattgtaataagtatatgcttcatttattccctgaatatttattagttctgaggcttaataattagagtatacacaaacatgaaaaattaaatgcagcaacattataagagccgttacaaggtagtataggagtaaattgtacagacaactcacatcaggaccactgtggcctggaaggacatgtgagtttgcataggcagaaggaagagggacattatagacagagtaatggcatgaaaaactgggagataagcatgagtgttgagtatctgtagagcagcactgtccaatagaatttctgcagtgatggaaatgttccacatctgtgctaatacagtagctgtagccacacatggaacagcattttttaaaaaattaatttatgtttcagtagccacatgtggttatcatatcaaatagcacagatccagaggcagtgagcagccctgcctgacctcagtgggtgttcctcatggagcctagtatggtggtgtggaggagatgctcagaaaggttgacttccagtgagaattttagggccttagagtgccagaataaggaaacattgggaagtcactgaaagtgtttgaacatgcagtttgcactggagggatagagcccagtgccaggagatcagtaagaaagctattgagttatgtgtgagatgataaatctctggtaaaggtagacatggaaagagaaggatttaaaaataaataaataaataaaataaaacaaaaaaccatgaaggcttggtgattatgtggctataaagtaatgagaaagagatgtcggagatatatccttaagtttctaaacttggtggctggaaaactaataaagatgttacttaagaatagggaagagctggttgtagaagaaataaaaattgtgcaaatgataaattagacttgatgtgttaaatttaaggtgcgatatctaagtcaaagtatgctacaggcaggttggagataaggtttgggaggacttgaaagctttacgttagactctctgcagtcatctgctgggtattctgagacaaccacaaagagagaaagaactggtggattgaatcttccattggagcccacggttaggaattaatagaaggaagaggctaatttgaagtagactgcctgagaggctgtttgacatagaccaaagaagaaactggaagaaaggcatggggtcagaggagtgggaaaaccaggaagccactggaagagagattctagaagtaggtttggaggggaaaatgtacagttcagggtgaaggagaagaagtcagataatcatgtgaatgcaatttcagagaaggctgaatacattaagaagtgagagagtcttatattgccttaagtgacttgaattttaagatagatgagacctcttcatatttgaaggttgaggggaagaagtcagtggacagagagcaattggaggtgatggagttagccatctggagcacaagtgacaaatgttgaccgtggtaaggagggagagttgtctgagaaagaaacagaatggggtccgagtgagaagaaagcatgtggcagagctcctgtgcacttttgctgattttcctgtattgttggaggtaagtcctttcactgggatggtgaggaggaagatcagcacatggtaagggaagaagaaccaccgtaggtagtgtgccaggcaatctatagagaagtcaaattctaaacaattggggggaaacctggggtgaagtgtggtgaggctgctgtataggagactaggttaattgttactttttggtatcactttgtggcctggtaggcttagggatagcaaatgggttcagagataagactctagagtcagattgcctgggtgtaagaccaagccccaacacttacttgttttataagaagcctgatgaactaaatgaattgagaagcagtaagcaatgagaatcttggtaatgaagtagtgaaatatcaagtttgggaatttgtagatagagcatttccctaacaattctagataaaggtttctaagaaaagtatagaaattgaactaacagaagaatccctgtaatgattttaaaggttaagttaattagaacttaaaaaaataagtattgtattctgaatttttctgtggcttttattacagcattcattacggttaaaaacatttctttttcattaaaccaatatgtgcttaatgcagaaagattctgcagtggattcttgtcatagtgttagaaggaaaggggagtttgatttatgccactggggggagggttattaatagccagccacagagcccttcaaaatgtggctccaaaggcagaaacaataaaggaaactttttatagatttgatagcatttattatgtgaccaaacatactcaaaaacaaaacctgaaagacagataaagagatttgcaacaagatattgttctttacaagaaagacttatatcaataggaagcaccaccccaatagaaaaattggtagtggacgtgaacaagcatttcacaaacaaatgaaatgccaactgctgacgggaagattctgcgcctgtaatcccagctactctggaggctgaggcaaaaggatcacttaaacccagcagttcaaggctgcagtgagctatgattgtgtcactgcactccagtctgggcaacagagtgagactgtctcaagaaaaaggaaaaaagaagtacaaactactaatgaacacacaatgttttggttatgtcctggatcagacttgattgaaatggggatgatgtcttcctttttcctgtattttgttattctttgtatactaggaagtatcagtctgggaagactgggcttttctcatttaaggaaaggaagcccgaatttcccagcctcctaggagaatctggagtgtcaaggaggtacaagatatatacaaagtagagttataagaggcaggcaccctgcttccctccataacatggttttcgtccaggagtttccttattgcagtgtgaggggctatcagttatacacagtttctcagtcacctggcgtagatgatgaaccttgaagacaccagtgcttcctagagcatattgaaataggcccctttctctcctacctgaattgcagtattagattttatagtggcatttgctcattgatgtgagacgcagtgatggtcttggagtatagttttgattattgagatggacgagtttatgaggtattaaataaagtgagaaaagttccccttgtagtaaaaccttataatgtttaaaaaaaatgtaaaagttaggcatcagtgtttaattttacaaatttttttaaaggataataggggtcatgggttttctgtcagtagaaaactcaaactgtttttccctctgctctcacactacaacagtcaacacaaaatacttttgtgactaaatgtgtgtgggtttttcgctacacaccaaacactggctgggctgggtgtcttccaattcaattttgactctacctggagatagcctcagatcccacagattgaaggttcagtcccacccacctccaacataagtccaggcttctggaacttctggctgaccagcttcaagttggggctcctatgactccgctctttggattcaattaatttgctagaatggcttacagagttcggggaaacttacatttactgatttattataaaggatattaaaaaggatacagatgaagagatacatagggcaaggtgtggaggaaggggcatggagcttccatgcctaacttgggcgtgccacgcttcaggaacctctgcatgttcagctgtccagaagctctctgaaccttgtcctcttggttttttatagggcttcattttataggcatgattgattataccattggccactggtgatcaacttaaccttcagccccttgccccctcccttgaggttggagggtggggctgaaagtctcaatcctctaatcttgccaccatcctaaagctagttaggggctgccagccaacagtcaatcattagcatacaaaaagacatcactttggagtctccaaggattttaggagctgtatgccagaaacaaggttgaagcccaaatatatattttacagtaccgcaggtttaaaagtctattcatatgctgcccataaggggatgagtctgctggttattggtaggatccttacctaactgaattacattcagccttaagtgagttcttaccttgccactagacagaatcagaatttgtctgcgtcttctgtcttaccatctcctttcttttaaatgacctgcaaacattttaaagttggataaaaaaggcttttaaatctcaccttcaggctcacaacttggcccactagcatcccctacccatccttaagtcctttctgagtgggttgtgactgggagtacgggccctgaagtgatatgcattggtgagacttgtcactcaaactctttgagctaagtggtagagggaagagaaatgccaggaaaatcggtcttaattttatcagagacagtagtttttcatgaaagagagtaatgatacagtggatattgctgtagaaattatacagctggttgcgtatagcttgccatctcatctattacagcttcctgttttgctttttgcacattgctggctttgcagtccaacatatttaataacaacctctttatttttcatgtgtttatgtttgtgtgctcagggcttctatttagtttattcaagcttgagggaatatttgattagttttaaatgtttttctgttaactgtgaacaaaattaatttgattatcatttaaatgttggcacaaaaactgtatttatagcatttattcgcattcatttatagcatatatttgctgaagagttttgtcaatttgtgtgggctgagatgttctgtattctagaaaaggctcctttaaaaggggtgtgtcctcactgtggagttctccttttttgttaagctgatattaatcaattcagcaagtatttcatgcattcctgctgtgcatccagcactggactatgttttggatgggatagagaaaactgtaagtcattttctgccctgaagaagcaatctaattggtaagaggagattatgcatttgaaactttcacttcaaaatcaagggattggggaaaaaagtctgatgcatttgatagagctttttgcctctggcccacttctaccttactttattctgtatttattaattttttttgagacagagtctcaccctgtcgcccaggctggagtgcagtggcgtgatcttggctcactgcaacctccgcctcccaggctctagtgattctcctgcctcagcatcctgagtagctgggattgcaggtgcccgccaccatgcccagctagtttttgtatttttagtagagatggggtttcaccatgttggccaggctggtctcgaactcctgaccttgggacccacctgcctctccctcccaaagtgctgggattacaggcgtgagccaccgcgcccggccccagttcattctttcagcaaggttttgagtgtctgtatttctatttatgcttatgttcatagtgtatctcttagacagcttgataaagttgggggtaaggaattgtaagtacaggacctgcactgaggatcttctaactttaaggaacaatacaaacctgcttgtctagtctagcatctgttgtaatgccttttattacaattaccttattaactctttagactgagttcctcgagggtatggccagtgtctttatgatctttgtgctcgcacagtgcctagtgcagtggttctcccttgtctactcatcaaaatcgtgtgaacagctaccaccacaaagatgcctgggcccatcctattgaagggttatggtaaggaagcttttaaaaatactgttaatatccagcaacattaagaacggttgggctggcacacagtaggtacttggtgaatgaattttttcattttgttgtttttagaattacatcaggaaatatggtatgttgtgagttcattgtagttatgaaccatgtcttttatactctgtagcacccagcactgtgtgatgtcagttgtgggtgctcagacacaccagttaagttctgaggattgactgctttgcttcccctttttttcattgaggagagcagagacagaaaggatatgtgtgtttgacatctctcccttttccctttgtggaagaatcagcagttctgtgaatcccggagtctgcaaatgagttatagaaagctgttgaggcctgaggtgcttagattgcaaagagaaaaggagaggaaaagtggcagaatagagctgtggcttatctggctatgtcagaaaaatttttggttgtcacgaattggagggagacgctggagggttgcaaatagcttctagtgggtagaggccagggatgcagccaaacatcctgtaatgctaaagttgaggaaccctgaaatagaggataaaaaaggggatcaggagacagatggggtaactgaagtggtagtgtcatgaccgtttctgccacaccagcacacagtttgtgtgctttatcttcccactttccttaccccttaccacaaatccttcagagtccagagtactatttttgccattatctataagtagcattgtgacttacaactgtgtattaggtgttgaaattaatatcttagcatcttatctatgttaaaatatacctgaaagattcctttaaattttctttatctctacatctacttgattggaaaactattaacctcaagataaaaagagctagcaatttttgttttctttatgttttcaataaaggatcttaaaataatcagtgggaatgtaaagaaaattaatttcctttttttttttttttttttaactagacagggtcttgctatgttgcctaggctgaaggctggtgatcacagctgattgtaacttcgaactcttgggcctaagtgatcctcctgcctcagcctcccaagcagctgggactacaggcatgcaccacagtgcttggctttttttttttttttttttaaataaaggctatgttgcccaggctgatctcaaactcacagcctcaagcaatctttccaccttggccttccaaagtgctgggattacaggtgtgagccattgcacctgggtcaagaaaatgaatttcttaaaaggagtttaattttagtgttctacagattcatcatgagaaaaggattattaagatttgaacacatacaagagctaatggtgccaattttctgatgtcttgttgaatgatagcttataatgtcttattctaagctctttagattaaagtgaatttaattttgtcactgctgccttgataaaactcttgttttttttttcatgttctgggtaagtgggaaggtatcaagaaggaaagcaatagcaaaaacaagaataaattagaaagggatggaaggagatggagggaattttttaaaactataagcaaatccttgcctgttactctgccttatgcatcaaaccaagggggggactactgtggagaagcagtagagaggttaccttggcaggttccttaactttttttgtgcctcagttttgtcatctataaaatagttcttgttctataggactcgtgtaaggattaagagacctatttaattaaatttaaagtgctcaaaacagtgcgtggtgattcataatggttgtggttgtggtgatgaggatgatataaggatgacttttgattgtttttgaatatagttgacccttgaccaatagaggttcgaaccgcaggagtccacttatactcagatttttttctcaaccaaaagtggatagaaaatacagtatttgcagaaggtgaaacctgaatatgcagaggggcagctttttgtttatgcacgagttccacagggcccactgagacctgtatgcaaggattttggtattgggtggtggggtctgggaaccagtgccccaggtataccaagggatgactatacttctgttgaaatttgatggagaccatggatgcacttttatacagtgtttcccataaaaccacctaccactttctccctttgaagttggtggtgatagtgataaaagtttcttgagttttcaaactagtatgtttcaggtgttctgtaaaagtctgtttttttgcctatactctgaattccaagagaaagagtgatttatatgacataaaatgtttgtctttatgtttttataatatactaaaacactatagttaaccgtcatccatttacagattttccacagcaatttttgaatcttaaataggcatttctctagaatttactatgttctcagggcatattgtagttttattaatagtgtaagcaaaatataaatgattaaaagctttgatgaatcataatacattgtagaagcaatagttaattactagtaaggctgctttggattatctgtcccatttttcatacccactgaaacagctggttgatatttggactatttggatttccactgtagggtaagtaacaccgagctcaggatgcgtggaagatgtcgttgtagcacagactgtaggtcgctctgtctgcacgtatgtttctccttagatgaagagcctgaacaggcggtcctgtgactcttatcatagtgtaccatatgatatggttctcccatctctcccatacacacttcataaccataagcttgatggtaatgggaactgtgttatactcattttctttctactgcacctttatgttggtgataagggcttaaaaatttgttcagttaaatactggattaatggaaacgaaagccttcttagtagctgagcgtgtaaaggaggagaacttgggttctgaagtcttctgagaatattgtcttgggtttttccattgtaattggtaaataaattactttagggaagttagcagataagactgtactgaacaagtgatcagaggtagaaaggactagattcatgggcacagggctcacctaattctataggtgatgcttgcttatatctaaagcattatttctctaaaaccagtgaaaaactttgcatttgcttcttttagctcttaggtggagggagctctcacattctggaagagggggttgctgctatttgttcagtttctcctccaaggtggccaaatgaatgtttgcaattccagtccagtttttggcagattgaaaaagtctgtcattgattgtcatatgagagtggaatctggccgatgtcaatgtttgtttcagtggttagataaactttgatttttagaagttattctttcaaataacagatttctgtaatggaaaaaggacaggaccaaattgcttgtgaagatatttgaataacatagaacatttttattttaataagaaattcatgcattgaaaaatttgatggatatttgaacagttaataaaaaggggagtaagggtctaaaatgggagggaaacttacttttttgctataatatgccattttttgaaatggaattttttgattatgtgcctgaatccttaataaaagagtacattccattcctatccatatcatattaacccagaatagggtcatgtattttaccagaatacatttctctgaaaatcctatgcagatacactttcaattattttttttcctttatacaaagatatatcttgccacctgttggtcataatgctgtcttctagagccatgtagaaataactctcttacctactgtcagtttttatttatttttgttattgtggttttaaatttgaaaacagcaattggttaaaactaaaagtagttggctctcctgcactcccttgtacccagctcactcctaaaggtaactacttgttcagtttcatttatttttttctaggcctttaaaaatgcacatgtatatacatagacagtttttgtttctatttgtgtttttagaaagagaccatactatagatactttttaccacttcttactgaacagttgtggtatggttttcttttcatggtagtattgtacatgaaagtccatctgttttttcttattttattaacagttacatcatagtcgaatgtatcataatttatttaatcattccattattgttaggcacctgggttatttagaacacgaatatacttgaacatagatctttgtgtgtgttcatctgagggagctgtttcccctgtggctctctcaagccgtggctggtttttcccataaaccttttacctcttattgccaccttcagaccattcttctaccatcctctataaaaaacacccaacttcgactatcatgtaaaattataccactcattactcttccttgttagtcattttctgccccattgcccatatcgttcactctaattcctacaagatttaactcctggttgttattccctttatactataggttgagcgaccctaatctgaaaattcaaaatgctccaagatccaaaactttttgaggactgatatggcaccacaagtggaaaattctgcacctaactttatctgacaggtcacagtcaaaacttttttgtgcacaaaattattaaaattattttataagattggccaggcatggtggttcatgccagtaatcccaaccctttgggaggctgaagcggtggatcacttagcccagaagtttgagaccagcttgggcaatgtggcaaaaccctgtcactaataaaaatccaaaaattagccaggcgagatggcacttgcccgtagtcccagctattcaggaggctgaggtaggaggatcacttgaacctgggaggtctaggctgcagtgagccatgccactgcactccagcgtgggcaacagagcaagaccatgtctcaagaaaaaaagaaaaatttcagcctatgtgcataaggtgtagatgaaacatacattaattttatgtttagacttgggtcccatccccaagatatctcattttatatattcagaatattccaacatccaaaaatacctggaatctgaaacaccatctggtcccaagcatttcagataagggatactcaacctgtattcctgtacaggaattatggacatttagtccataattcttggactacttctcctccagtggccttgtctttggtcctacctcagatattcaatctctgggtagaaagattccataaaaaaagaagaaaaaaatctcgctcagtcttacagttcccataatacgggttttcatacttctaaaaattaaacaattctccaaccttacagttaattattttctttatataagcagtaaagtattatttgttcatgtctgtactttgagaatatatccagaatctgacgacttctgccacgctggttgaaatctttatcatcttgtaccttaacaattgccatagcttcctaactggtctccctacccaccactccctacttcgatccctgcgtccttcagtatgttctcaacccagcaagccacagtaattctattaaactctaagttggatgatggctctcctctgctcagatctcccagtgtttccatctcaatttgggtcaaaagctctgaagtctctgtgggtcccgcacataccttcccctgtgacctctctggcctcatctctcatttctctcccctcactccattccagcctcagtgaggactccttgccattccttgaacatctcaggatcattcttgccaaatggctcaaatggcttttgcaattgcccttctctctgcttggaatgcccttccccagataattcctttcagggggctgttcagataccacattcacgacgaggctttccctgaccaccagaatgtaggccccaccaaggcacagaaacagactttgaaaaactttttgtgtctctttcagtgctgcgtttctagtgcttagaatagtgcctggcatgtgatagctgtttgttgagtgaattgaataactgtagtggttactagtttttctctttttgtatgaagttagaacttcattaaacagacaaaaactagactgtaaacctcatttttttggatatgcaaaatattaaaattagccttatttgtgaacctgctttgttaatcactttgtttttcagcatgttataattttgaagtaagcctttcatgtttatatttaatctgcctaacccagtggattgggtgatggtatcacaattttgtggaaaagcaaattgaggctcagagttgttttcttcaaagtacagctactaagtggacagctgcagttcaaacctattcaagttaaggacacttgttttctaatttagaaaccatcttaaaatgacaaaaaagtaggtagaggttttatttgaaagcatggagaatgtgccccaatttctcattctgggttttgtctgccttttgtttccattttcaaaatatgtaaaataaatggttaactttaaaattcctgacaatgacagatcaacaagttttatttctctcacctgtggaggaagtggcctccacccagttttactgaattaggagggaagtgattttttcaagtgataaaaagaaataaaattccatgctcttcccagaggaggagttcaacaattgggaaagtggcgtgagaccatatgttggtttgtaaaaggatataacttgtaaagatgtttcctttgatgcctgtgatgaatatggatgtgtttcccttctagagggtcctgattaaattatgcaattaagagctgagctgaaggatctaaatataggaagagagttcaggccgtcctgctttgtgtctgtcagttcacccctacagatgtgcatgtttgttgtcataaacagcacctgtgagatcagtggagcgagagaaatatgttccaaaacatgaaatacagcaggatttttgtttctttttttttttttaaagggatagttttttcctcctgtagttgattccattttcatctgtgaatttgatatttggattaccttttttttttttaaacttgactgagggacttcagtattagtcagtactggtttaaaatatagatatactacttaccagaatatggtctggagaaagttactttaacctctgagcctcaagtttattactaaaattgagataatgatttctaccttgaagcattggtgtgaggagtcaatgtaataatgtttgtaaaaacaaccagtataatgcttgtataagttggtaactcaaacaatttcgtttattagctactgacgaatcattcataactagccacttacggaaatctaccacatttagcattctttgtagtctaaaattgctattttaggataactgactcaaagagaatagttttttctgagacaactaccatagactttctcctgggatagtcaataaaattaaatcttaaaatgtctgtggtcttcaatctttcctgtgtttgaggagtgagcatttgtaggccaggagtctttacagtgtttgagttgacatgaatgtgaatggcctttatcaggatgagcttatggggagctggacatcttgaaaggctaccgtgtcctgaaggacagtatgccattacaagcatgaatttgggaatgggggttcaatgggattaaggaatgttgtacaacttttagaggaaatggcaagaagatatagaaaagccaactttgtttgttgaagttggggacaataagaaaactttcaattgccttaactattcaagtaatcatctaatcagacaaaacagatgtgacagctgctattttatagggaatctctgtgattaagaaaaattaaccaggtactctattagcagcctagatttgtcaggatggaaggatttgtgtatgcagaacagaaccagaaagaactctttttaaagaattttctgatataatgaagatacgttaatagcacacttggcacacctaaaataaataaactacagttatatccttagagactcttgtcattctgacatccataagttccttgcttccttttcatcaaggagatgctacttttgaaattgtttggctgaaatttcacagcttcagtgaacttacaagtggtaagtagtaagctggaattcagtctacatggtattccttttctttttgattcctaagatttctactcacttaacactgttgagggaccaaattgcatctcttgctggcatgtcacttaagttatactggagagactggaagacttgctgtcagtgtctgcgctttaaacgcacagtgtctgcgctttaaaggcaatagtacctgcattattgcatcactataaatagaatttcacgaactgaacctctctcctatctccaacccccaatttctccagatttagaaaatcagtctccggcaaaaataaattttcagtgggaaaaatgtcaaactagctattctgcatcatcagtcccatgtttggaagtagccagatcaaggctgaatagtaagaggctcagtaagatggaactttacttgtggtgtttgtgatggtaggactctcctgctgctgtgaactgagagcagcagagttctgtgttctctgtgggtctccgtatggctttcttgtgtaggaatttggtttaaatacatttttcccctaaggactaaagcgaaatagagttcattatagcctttttagcaatgaagttaagcgctgtactttatgaagtacgttagcatcagtaaagagcaaggttttatccattttcatttttctttctgttctagaggttttttcctcccttattttgcttagtggtgagttttatttagctaaatttgactcatttgagattgagacaaatgttgaaagttgagggctaactgctgttttaaaacaggaaaaaggaatgcaggcacttcacctgtttcctcctccaatacaaatacagcaggtcctcagacaacctcatttcattcaatgccatttccttataacgttgatgagaaaaaacattcccagcctaggccactgtctgtgtggagtttgcacattctccccatgtctgcttgggttttctctggctactctagtttcctcccatatcccaaaggtgtgcacgttaggtgaattagtatgtctacattgtccccattgcagtgcatgtaggtgtgtgtgtgagtgcgccctgccatgaaatggtgtcctgtccaggggtggttcccaccttgtgccctaagctgctgggatcggctcgggccactgcgaccctgaattggaataattgggtaaataattatcttgtttctgttcatctttcttaaatgtatatatggctcacatttatttcagtgttaattttagaagtgttttgggtctcagaagtttggtaatgtttttgtgaccagaaatgtcctgaaggaacttaactcttgtttatataaattagctgatgctaaaattaattttgttttacatcgtttcacttagagccacagtttccaagaacccgtaaggactttactgtatctgaaaacctggttagctcctaactggagtaactgggttaaagaagcatttgaacattatttgttgaaccagatcaaagaacattgctactttagggtattttctggaactgaaataactagatccatttctgtttttatattcattgtaatggcattggacttgtatagcaaattttaacttgtcttttgcctgtctgccttaaccttaagggtagatatttatcattttccttaaggagctgtacaataatctttcatgctttttgttaggaaccatttacaattcctactgtctgctacttatcgttgtgttctacttgttctagagttctgtctccacctgtcttcatttttaggggtactgttttttaggggtactatttctctgtttggaaatgtgagcggatggcagtttctgcctcagccctcttgctgggccattgtctcatgtgggttgtctgctgttccacatttaagtaatagttatttcagctttatcaaaagtttgtaagttcccagttcttctggacttctgattaattcagcctgattttatttagggcaaatgattatgatcccctttccattttgtgaatttttcatattttaccaataaatctcattgcaattctttgcttacaagatggcttgaaagatgcaagcaatgatggattgctctttattgttttaaaatatttattggccttaaattgctgaaataatatggtttttccaacctttgtgtttttatgcatttttaaccctacgtctttagtgtataatcttctgtgagtctgtggtttctataagtgtcaggaatttttcaggtgtctttattatcctttgaaatcatgatctatttggacaattccatctttgtttggactatacagttgacttgagtacctaagtgaaatggagcaggttagaaaaaagtagtttgttttatagtaatgagaattacattacaagtcccctggcatgttcccctttgaccttttttgatgttttaatttaagcatctcaaacaaggcaagagttgatctcaccaggccttgaatcctatccaaaattggatgttaggatagatgacacatacatttctgtaatactaattaatattgccagttaatattgatcactttctacaacatgtctctgagatatcttgcatctccatggcatctaatgaggtgtattgtgaaatagtttcatatattaaaaatactggaaaataatataaaaaattagctgggcgtggtggtgggcacctgtagtcctagctgctccggaggctgaggcaggagaatggtgtgaacccaggaggtggaggctgcagtgagccgagatcgcgccactgcactgcagcctgggcgacagagcaagactctgtcaaaaaaaaaaaaaaaaatgctgaactacaaaattcatgcagtttgcttataatcactctgaagcccaccataggtctactctggaagctcaagtcttactttttctgtgtattcacaagaccagtctatctgtttaagaatatatctggcgatgtaagtctggaaatacgcacttaggtggttttgttacttagaaatatttgtttccaaaaaggaaaaaaaaggtcaaacaatttttttttttttgaggcggagtctcaatctgtcacccaggctggagtgcaatggcacaatcttggcttactgcaacctccacctccctgttcaagtgattctcttgcctcagcctcccaagtagctgggtctaaaggtgtacaccactatgcccggcttatttttgtatttttagtagatacagggtttcaccatgttggccaggctgatcttgaactcttgactggtgatcccccctcctcggtctcccaaagtgctgggattacaggtgtgagccaccaagcctggccgatcaaacagaatttttataaagttgtctttaaaaaaaagaaaaaaaaagtatccagctgttaaacattttcaaagtgaagttaatcaataccctgtacttttagttccttaattcttttgatctttgtgccatgattttttactattagttaagaaagtgtaatgaaccaaagaacaagaagtagggggagaaaagagttgcctgcttcatttgacaatagaccatttatcttctgttatttgcctttcttaaagtacggagagtttttggatttttttcccccagtcactttttgtagcctgtattttttgtttattttattgaataatacaattattccctcaatatttaatgggagcatttattttgtctgctgaattccatactggtgcaagaattataaaacagcctctagtctgaagctgatacagagagtggttgaacattatttgtctcctaatctttttattaaagggggttgtaacatttggtggttactccttcctttaaaaaacaattatatcttcatatacaaattagggtaattaaaaaaaaactttctgtgggaatttgggatctgtaacatattaaatggaagagagtgtattttgttgatattcacaggagttggataatttacttgttgctttactagatgaggccaaggtgaagaaaatgcccatttgttctgcaattggctgattaggcttcctttaaatataaagcaagttacatagcagttaagagtattttaacatttttttcttttaatattaaggaataacacataagttggaaaattaattagccgtgtcgagtagtataagagtatttttctaatttcacttctggcagttctgatagaaatccttcccatgggtgagactccttaggaaaacgttctgagttcagaacactgctttaaactacattatattttttttgcttctcaaaccagatcacactataaatccaacctgatttctaagtagagtatagatgtggcttgagataatgaattgatttttgtgggttttttttttttgtaattagcaaatatttgcttcgaaaacctttttataaaaaatcagaagttacattttttcattaaagaacgtttgaaaagtttagaaaaggaggagagagacacattactaatcttccaaacccagtcatggttaatattttcatatatttacatagttgttcatggtacatataaccaaccattttatgttctgcgtacagttttccccaaattattacgtagtctttatgaacataatttttaaggtctgtataatattccattgagtggatgtatgcagtttacttaggtatttttcaattattagatgtttctctttttttccctattataaataatgctctgatgaaaatctttgtgcaaaaacaattttccctttctggttcagaatatttccttagagtaaatttctgaagataaagttgctggaataaagatctcaatatttttaaggctgctgggtttttttttttttactagatgaatacttttttgttagtgtgaaatgtttatatttggacaagagggaaggaaatctctgtttgctgactcatgtttttattttgcactttaaactgataaggccacttagcttttgacataaactaaggcaggaagtacaaaaaggggcagaaaaaaagtagttgtcttgccaaggccatagtatcatggactcatttgagttccttatatgaggtaggttacctgtttgacttgtatattaaaaaatgcttaactcaggtaaaaattagtcatcagcctgcattttgttttgtctgggcatgtttatatgcaaagtgctgtgatctttcactttaattttcgtgagtggcctcaagacatttaccacctaactggcttctataatgtttggatgcccttggtttagatttttttttttttttttgctcccagtatgaagaaatctttctgtattgaagatattaccttagttgtctttctaaaatgtagatctaataatgctaattctcagatttaaaaccttccacttgtccatatgataagattcttcagtcttgccccttccttcatatcagcttgtatcatcatctccagcggattaaaccctagcatttctatcatgtgtctgttggaacaagccatttggaaaagtggtttaaaaattctggctctagagccaggcaaaatgggttcagatccaggttctgccacttatagctgtctacataactttggacaagatactcaactattctatattttattttccttacatgtaaaataaagaaaatgatagtatttacttcacagtaaatactaaggtattgttgctaagattaaactggttaatagataaacagcagtgaacagtgtttgtcaagtaatgaacacacaaaatgtttgctctattgttttgcaaaattctacttatcctttaagtctgatgttttctcttggaaaaaaatgttctgaaatctctggaattgttctttccttttccgtttttatatattattgtcttagtttgtaggccgctataacaaaataccatatagactgagtggcttataaacaacagaaatttatttctcaaagttacagtaactgggaaatccaagatcaaggtacctggatggcctcttctctctgtaacctcatatggtggaagggaggagagatctctctgggatctcttttatgagggcactaattccatttatgggagctccgtcctcatgacctaatcacctcccaaaggactcaccttctaattctgtcacctttggggttaggatttcaacatgtgaatttagggaggggatacaaatattcagaccagagtgttgttgatacttgttttatagcctttatcacatgatattagagtaagttaatagtaggtaaatgcacagcacatgggcctcttcttcggttattcttgtgcccatgggcaatggtataatcgtattatttcttctgactgagtccctggaaggtcacctaataaaacatctcagcaaagtcctttagaattagcatgcaggttagcaatttgctttatgggagttagttgtttacacactggctttcccaatggattgtgagctcctccagtatgttagacatgtttgcttctgtgtctcctgtgtctagcactgtgctaggcatacttagcaggtgcttaatacagctttgttgaatgaatgtcgatttgaatagttaaaacaaaaatctgaaatggtggttcttatataatacgttgcccaacacttgccttaaataaatacccccaagtgattttgggggtatttgtttaaatgtatttgttatatattttaaaatagccccaagttattttgatgcaaacttagccattctgtttaaaaattattgcttaaaatgttaaaaagctgtttttgaagaagagatggacatatagaatatgaagaaatacactccctctataaattattcccagaagcctagaaaaaagttcttgttcttttgcaaaactaaccttttagtaaaaggaaattatcatatcaataggtacactctgaccaagtgtgacttttgataatagcatagttttgttttctctttcctttaatgttaaatgaaaataataccaacttcaaaaaaactagtaaatttgggtgaactctttaaaaaggaaaacagcggacaccctgtggcctcccaaatagagttgacgctccgtatttggctttctaagttcttcaaggagctaaattattcatcaggcatttagtgagaatcagctatgtgccaggtactatgccaagttccaaaggtaagaaaataataagttggagtcctacattgtttcctgtagtgaagatgacagatgtgtagattatcacaatgtagctatagacatgcaccgtttgccatgacagctatttataataattataatttttaatttctgaggctaacgatttccccattctgatccatttattggtaatttgtgccttctcttttttatttatcagttttgctagggatttatccaattttattagtattttcaaagaatcaactttgattttataggttttctttagtatgctttaaatttctgctttcattttcttctactttctttgggtttatttttccttttaaaaaatctttggcgggtattagagtgttagttttcagcttttttccttttctaatatatgcatttaagactataaatttccctctgtgccttgagccacatcctgcatttttgatgtgatatttttacaatcattcagttaaaaatattttctatttcctctataatttcttctttgacctttgggttattttaaagtttggttcttttcaataacaatgtttttattgatttagttatactaaaatcaaagaatatgttctatatgattttagtattttgatacagattgagatttgctttgttattcattatatggtcaatttcagtaagtattccttgcgtatttgaaagtgttatgaattgtacagttgttgagtgctgtgataatatgtatatgaattggatcaagtttttaaacaatttttttctgtatctattgatttttgtttgcttgttttatcatttattatgttaatctcccactaggattgtgggtttgcctgtcattgtaattgttagtcttttgctttatgaatttgagactgttattatttacataaaatttggaatttaaaaactacatggtggctcaactcatcactataaaatgtcctttttttcttttttgtctttaaaaatctctggtgatacctcttacttttgaagtctgttttatctgaatggatagctatgccagctttttgggtggaatatgcatagtatatatttttccactctcttgctttcaatactgtgttcttatatttaatgtgtgtctcttttaagtacaatatggttaaataatgttccccacaactctcttagttgtcatattttagtcatttatatttaagtaattgcttatactttgggattatatctaaatcttactattttctgtttgtctcatctgttgtctccttttcatatgttttgcattaatcatttttaaaatttttatttgatttttagagacgctctcactctgtcactcaggttggagtgcagtggcacaatcataacacctatcataactcctaggctcaagcagtcctcctgcctctgccccctgagtggctgagactgcaggcacatgccaccttgctggactacttttttactttttgtagagatagggtcttcctgtgctgcccaggctactctggaactcctcaagctatccttctaccttggcttcccagagtgctgggattactgggctaatcatatatatttttttaattccatatttttaacccatctattagcttgttataatttttaacttattctctcagttgttgctttattatgacatgaattcataacttactgtactaatagtaaattatactttaccatggcctggataacacaaggaccttagaatgctaacttcatatatctctttttgctgttgccatgcattttaattgtacatatattttaaacatcacaagacattcctattgttgttttgtgaagtcagtattcatttaaacttacccttatttccccttcaggagctcttcctcatttcctgcagttctttgcttatttctagagtctttttccttctgcctgaagaattcctgttagtatttcttttagtgacaatctgctgtaaaccagttctctcagattttgattgttggaaagcatctttatttcacaatcattttttgaatgtgtttttcctctaaatgtagaattttaagttaccagctatttacgtttggcactaatgatgtcatttcattgtcttctggtttccattgtttatgctgaaatgtcagctgtcaacctgattgtacttacttgaaggtaatgtgcctttttaaagagtttcatcttaggttttcaagaattttactgttatatgacacattgaaatttgtggatttctctgtatgtatccttggaaggtgtagggcttcgtgaatgtatggttagatgtctgttgacagttttggaaaaatccttggctagtatctaaaaatattgctctgttacagtctttcttcttttcctttaagactctacttatgcagtgctagacctttcactagagccattatgtctccttagttctttatttttcattttttccctctctttgcattagtatgagcattttttaccagtcttcctgctcactaatcttttattctactgtatttaacctgttgttaagttcatcctatttaaagtctcattagttatatttttcagttctagaatttttatttcattcttctttatggattccagttctctgttaaaatcttcaaccttgtcttctctttccttgacatagtaaatagtaatcattaatactttaaagtctgtttctggtaactccattacctgggtcacccgttaggtctgtttctattctgttttgttttgatcatttggtcctgtttcttggtatgcttgataacttttggttcattgcatacactgtgaatttaaaattgtagtggctaaggttgatgttgtcttcctctacagagaatttgtttttcttctggcaagctgttagagagcaatacccatcacctagaccaaggctaggattaagatgattctagattggttgtaaagactgatccgtttcatttttgcccttagactggggcatattcctccaggagcttccattgaaagcctagactatttaccagggtttctcctcagcaggccctcaactccatttgttgctgtgttgttattttggggttcctcagcgctatgaggctactagaagctctgcttagtttttagcctcttagttacctctttctgctcggctcctagaccttttgctgctcatagcatagctattggcaaatccctggaaagagtggtgacgaatattcagctcacttcattgcatttcccctctctccaggatcttggccccctcaagtcctgagtgccttggttcctctttgatgcctttaaaaagctgggcttttgtttgtttgttttctggcttgtttgtttggaaggaggttggtctgatacgtgctactccagtttagccagggtttgtacaaagttaacctccttaacctttttcacattttatgttttcatgtgctaaagagtaaacagtttaaatgaggcaacttggctaaagaatttggtacagtatgtgtccatgtgctttattccttttatgtcaataaatagcaacatttttaaagcaggagatgtatttcctatcctatttgtcctgtagcccatagacacaggcttgttcactgaagaaataccctaaaatattactacatttatataagaggaattttcttttagcctaagaaatatttgtagaacaaaccaaaaaaacagagatattagactatttttttctccctgttgctttcagtttttgttgattgaggtgttttgaaatatatttttagaggttataaatgaatctaaatctaaaatattacaatatcttttgagaacttgggctttttaactttgttgcttttatcccagagcttttgctaacagtggcttactttttaaactgcttctcagtttactcatctgtaaagtggcagcaattgtattacctaactcaaaggattgtgaaaagcattaaatgctatatattagtctgctttggttgccataataaaatatcatagactgggtggcttaaataacagaaatagattttctctttgttctggagtctggaaagtccaagatcaaggttctggacaatacaggctctggtgagggctctcttcctggcttgcagatgatcaccttcttgcagtaccctcagtgtgtgtgcatagaggctggaggagggagatagcaatcttaagaccaccagtcctatcaggttagggccccaccctgatgaccttacttaactttaattactttcttagaggctccatctccaaatatagtcatactgagagttagggcttccgcatatgaattttaggggtcacaattcagtccacagcatactgtattacataaaagcacttaaaatagtacctagcacatggtgattacttaataaatgtggttgtatggtaaagatgattctaaccattctttttttgttttgtaggtgctgactgggttacttttttaaacactaggaatggtaatttctactcttctggacttcaaactaagaagttaaagagacttctctgtaaataaacaaatctcttctgctgtccttttgcatttggagacagctttatttcaccatatccaaggagtataactagtgctgtcattatgaatgtgacaagtttattttcctttacaagtccagctgtgaagagacttcttgggtggaaacagggcgatgaagaagaaaaatgggcagagaaagctgttgatgctttggtgaaaaaactgaagaaaaagaaaggtgccatggaggaactggaaaaggccttgagctgcccagggcaaccgagtaactgtgtcaccattccccgctctctggatggcaggctgcaagtctcccaccggaagggactgcctcatgtcatttactgccgtgtgtggcgctggcccgatcttcagagccaccatgaactaaaaccactggaatgctgtgagtttccttttggttccaagcagaaggaggtctgcatcaatccctaccactataagagagtagaaagccctggtaagtgagttattttatgttgatgtgctttgtgtgcccagtaccagatttgtgttgtttagaacatgaaaataatccctttgcttgtttttagttgtaatttaaaaatatttggggaaactgtgtgtgtgtgtgtgtgtgtgtgtgtgtgtgtgtgtgtgtgtctgtgtgaatgcaagagagaaagcccctgagtgtttcatacattttaacagcttagtcatctctagttaacattatgtcttgggagcaggctatgacaattgtcattgcagtactaatacctctaatttttaataaattgttttctttctaaatttattttttatgtctcacatggttctctgcatttctctagataaaattagctatgaattgtattctaagggaagaaaattaggaaagaaatgcattattgctgtctatatgcttaagggaagtacatcatgagggtagttgccagtgacttaaaccattctgaacttaagaacagcactttttatcatctctggcggaattttgctgtggcatatttcctatggtgaatatgaaggaattatatccttctatggaatcatttgatgctattactttataaaatatacccagtttttacatgtatagtcttttgggagggtatggtaaaggatatattttaaaatttatacggttttgccctcaagttagaatctacattctagagagttggatcattggaaagtgattagatattcaagcacttaaatgtctcattgtcgattgggaccaattttgttgatggattggctgttaatagttcctgggttactaaggctgtatattagaatcacatggctctcctcccagaaatcctgatcctgggatagcctggtaatctttgtttctaacaagtacttcaggtgttactgatgtagctattggattggtgtttaggaattactaaactagatcatgtaataacatggttttcaaataaaaggcattctgtatttttgtggaatatttaagacatattttaaaaaaagattttaaagaccagtagtataacaaacatctctgtatcccctactcattttaagaaataaaagattacgtgtaaactggaacccctgtttttgctcctctgattctgctccctttggtaaccactgttctgaatctgacgcttatcattctcatgcatgtttttatactgttattacatatgtatgagtccatgacaatatgtaatattttatatatttaaaaatgttacataatattggagtttctttgtacaacttatgttcatccaacattacgtttttgtgatttctagattatatactttaggattaccttgttaagtcctatgaaaaacactttgggaatttattggaatttcgttgatttcatttggggaagattggcctactgtgctcttgagcataatattatttagtgcacttttaagtttctccatacagctcctgcacttactagatttatttctagataactggtttttattgtatccttttaaaagttacattttgttacagttgctcttggttaagagagcattgccttttttctaacaactgtgctgaattctccttaccagtttggatatagacgttctttactgcttgttatatcagctgtgatgcagtgttcttttttctaaactcagcacagaggtacatgtccctcttctagccagaaatggaaatggagctaagagttttggagagtaaaatgtagtagataagtaatatgtaccagcaatattatttaggcacatgatttttttgatcctcgtagtaaccttaaaatgtattaatacataggtaagattttaattctactccatatgcgatgaaactgaggcccctacaagttaagtgccttgtgttagaactagaaaatagaggcatttgacatgaaaggcaaaattcactatttaaaagacactatgaatatgtcttctccatccatactccccctcaccctgcgctaaccttccagcatttcatcttgcaatgcagcaactgcctcctgactggtcacccccttcagtccattgtctacagaaagggatcttttaagatgcagacatgatcctcttgttgtcctacttttccctactcttgagaagtcctctagagaggtctgcacattctggtcctttcctccctttccaacttcctttgtactcttgcatgctttgtgtgcttgagttctctggaaacattccatgcacgtttcctctatctgtacctgtttctcctccctctttgtctagcccactcttatttatcgtttgtgtctagcacatggtcattacttaataaactaagtaattgtgtgatggaggtcagtttcattgggaaacctttcttgatacctcctacttcacacatatctccctactctgcttggggaggttaggtctcatttcccatagcaacctgaatttctttagaatgttcttcacacttataatgattgttctgttggtcttctctgcaagatagtaaataaagctccatgagggcagggactatgtgtataattaacatctctatttttagcaacaagcataatttgataaatttttgctgttaaatggtgatgctgatttttaatttaatatcgtcatttggccatttttttagtgctgaattttcagtttatctataccttttgaccatcttcttcccttctttggtcattttatggctattacacctctgatacaaggtgaaaagttaaaaccaatactgagatgaatttgttactcttaataacatatgtgctaataaaataatggggaagaggtggaaaactggcttacataggcattttgagactccacaaatgccatttcagcctctcctttacccaggaatcttgtgagtcatggatagaatagaacagttctggaaaacatggaggctgaggctaagatctatttaatttgaacatatcaagattttatgtatatttttcacattatgaagtgactgatgtgggaattggaacaaaggactttttccagagaccactatgaagcagtccctgtaccttctgaagagaaactctactaaatcaaagtgcaagaggcagccagatgtggtggtacatgcctgtagtctcagctactcaggaggctgaggtgggaggatcacttgagccccagagttgaaggctgcagcacactatgatcatgcctgtaaatagccattacgttctagcctgggcagtgtagtgagactctgtctcagaaaaataaagttaaaaaaatgcagcatagtaaaaccccatctctactaaaaatacaaaaataagcctggcgaggtggggggcgcctgtaatcccagctactcgggaggctgaggcagaaaaatcacttgaacctgagaggcgcaggttgtagtgagccaagatcatgccattgcactccagcctgggggacaagagtgaaactccatctcaaaaaaaaaaaataaaaatgtgcaaggtgacttagcccctcacactgccagaattgaagccctctataaagccgtacagagtacacctgggtattgtttttgtgaaatcagaaaaagggggtctggaattctaagctgcacatatacacagctcaacactgaattattttgaactttgtcactattttacttctgatgaagtatctcaaagaacagtttagcagtttaacatatttaagtctcccaaacttggtgacttctgctgaggtctcaatgactcttgaaaaaaactcaaaaattgagaatatttaggtttagagtagtggttttcaaagtgtcgtccacagagtagtagcatcagtaccaccttggaacttgttagaaaagctaattattatttttaaattgacaaataattgtatatatttgtggaatacagtgttatgttttggtacatgtatacattgtggaatgatcaaatgaggctaattaacatatctgtcacctcccatgtgtatttgcttatttctttctttttctttttttctcttttttttactgcctattctctgaaccatttttttgtttgtttggttggctttttttttttttttttttttttttgaggtagagtctcgctctgttgaccaggctggagtgcagtggcatgatctcggctcactgcaacctctgcctcccaggatcaagagattctcctgcctcagcctcccgagtagctaggattacagacgtgcatcaccacgcccagctaatttttgtatttttagtaaagatggggttttaccatgttggccacgctggtctcgaagtcctgacctcagttgatccacctgccttggcctcccaaagtgctgggattataggcgtgagccactgagcccagctgaacctttttttttttcaccatactaatttctttttggtgagtacatttaaaatccacccctagcctaagcaacatagcaagaccccgtcttaattttttttttttttaattagcgaggcatggtggcatgtgcctatagtcctacctattcagaagctaaatcaggaggatcacttgagcctaggaggtcaaacctgtagtgagctatcatcatgtcgctgcactccagcctgggtaagagagagactctgtatcaaaaaaaaaaaaaaacccacttttttagcaattttgaaatatacaatgtattattaactatagtcaccatgctgtgcaatagatcaccaaaacttactacttctagcttaaggtttgtaccctttgaccagcatttcctctgtccatgttcacccctccctgcagcccctgataaccaccattctaattctacactctacttttatgagtctattttagattccacatgtagtgagattgtgcagtattcgtctttctgtgcctggcttatttcacttaacaataatgtccgccaggtgtcacaagtgacaatttccttttttaaggctgaatagtatttaatttgaaaaaaatgttcaacataagtaatcatcagggaaatgcaaaaactgcagtaagatatacctttcacctgttagaatggctgttatcaaaaagatgaaagatatcaagtgttggcaaggatgtagagataggggacagccattttggaagacagtatggaggttcctcaaaaaattaaaaatagaactaccatatgatccagcagtctcacaactgggtatatgtccaaaggaggtcaaatcagtgtgtcaaggagatgtctgcactactaagttcactgtggcattatttacaatagccaaggtatgaagttaacctgagtgctcttcagtggatgaatgtgtagaaatgcaaattcttaaacccttccacagacctacaatactgaatcagactctggagatggggacagacatctgtgttgtaacaagttctccaagtgaaactgatactgcaaaagtttgagaaccactggtttaaggtatccaggcaagtcatcaagtccgattgtctggatgaagttgtcttgaattcagaagagatgctaatgagctagtcttttaaatcctccagcatttttaattttgcatgtttggatacagatagaaaattgctctttccagagttttccttctgatattcattaagatgagccctctaacaagatgggataagttgtctttaagtgggcggggaagttggggagaagtctatgcttttgttattcggctcagtgcaagttttggaattgttctttagagtgtactatctctatctctttgacaaaagtaatattacggacgggaataattgttgcttttccttaacctatgccatttattttcttataaataaaacagtgtaaaaaaatggtagtggggaaaaacaaatttatgaaaacactttgctacaacttgtgtttattatagttaacaatgacaaatgtgcaaggagaaaaaccttccttttgttgaaatttgccactttgaccattgctgaaaaatagatctttgggaaagtagaaaatgttaggaatttctttttctgcaaatgtgtgaatacttacaggaaagagaaagttcgtggagcttctgaagactatgtccctgctgatgatttaacaggtggactgtttacttggacttttactagccttcagaatcagggctacttattagtggttgaattaaatgtagggtttattctttcttaccagagtaaatgctgacagtggttaagcaagcaatctaactgtggtattgagaagaccattcagttgctatcttctgctattaaaaatgccttaatggagattacctgccattggccattttttttttaatgtttttcacatggttcttgaaaattatcttctgcactttgaacttaatcagcttgaaagggcatattaaatctgagcttgaaattctgagatttcagttttgatctttaaggcattagcttccaggtgctttcattttcagcatgatggctgccagctgtttaaaattcacgtaaaatcctcttcacctgttgactgaatgcatgttttcactctttggctgcctcagtcactgtgtaattcgtgtcttggtaaattttaccttgaagagaaagtcttaaaattatagaaatagaggacagattagttctcaccaggggccaagaagaggaaagaggggaaggggagtgggtgtagccataaaagggcaaagtgagagatccttggggtgacggaaattttctgtatcttgactgtatcaatgtcaatattttgattgtgataattttgtaatattctgtgatagtctgtaatattctgattctgtaagtaggatttctctgttatccttaaaactgcatgtgaatctacaattaccttgatttaacaaatggttttctgtaaaaaaaaaaaaaaaaaagcagctagttcagctcacactggtgctctttgtgcacttttcattttgtcacacagaatattaaaaagacgagaggaaatgtaataaaattaatattttataaaacaggctgggcgtggtggctcatgcctgtaatcccaacactttgggaggccaaggcgggcggatcacgaggtgaccatcctggctaacacggtgaaaccccgtctctgctaaaaatacaaaaaaaaaattagccgggcgaggtggcgggcgcctgtagtcccagctactcgggaggctgaggcaggagaacgggtgaacccaggaggtggagcttgcagtgagccgggatcgcgccactgcactccagccagggcgacagagcaagactctgtctcaaaaaaacaaacaaaaaaatggtctgggtgcagtggctcacgcctgtaatcccagcactgtgggaggccaaggcgggtggatcaccttaggtcgggagttcgagaccagcctgaccaacatggagaaaccccatctctactaaaaatacaaaattagcccacgtggtggtgcacggcctgtaatcccagctctcagaggctgaggcaggagaatcgcttgaacctgggaggtggaggttgtggtgagccaagattgtgtcattgcacttcagcctgggcaacaaaagcaaaactctgtctccaaaaaaacaaatggaaatctttaaaaaatgtcttgcttcaccacattgtgaatgtgttttgttttgttttgttttgtttttttgttttttttaatttgagatggagtctcgccctgtcgcccaggctggagtgcaatggcatgatctcagctcactgcaacctctgcctcccgggttcaaacaattctcctgcctcagcctcctcagtagctgggattacagacacccgccaccatgcccaactaatttttgtatttttagtagagacggggtttctccatatggccaggctggtctcgaactcctgaccttgtgatctgcccgcctcagcctcccaaagtgctgggattacaggcgtgagccaccgtgcctggctgtgaatgtgtttttatatgacatgtgtgtggtaacaaaaaacttcagtctagttcaagttttttttaagtttttaaatatttgggattaattagcaataatattaactataaaaattaaaataaggcattatgccgtgtgttcctgcgtgtctaaatttctttttattcagacatttaaagcacatgataaactaactcctcaggaactgtgcctgccccagaaggttagcatgtaattacagcactgtattctaaattgaatagaggtgtggacagagactgcgactaactcttacacactggatagaggctgcagctaactcttacacacccaggagtcaccacagaaaagcttgctcactctgacacatataacacatggtgttgcaatctgtgtggtgatgggatatatgtgtatgtttcagtgcagaaaggacttaaatcagtttacaggttttggacatacaataaaatagaaaagaattactaataaaatagaccagggaaaatacaatgaaagatcaagactgagaaaaactagcacaaaggtgttccataggagttactataatacaaatatactatgtatatttgtataactataaacaaaaataactatcgttattatatgtttgtaatcctagtttgcatgtttctcgtaatagttttggtgtaggggagaggtgtatgtattaatagcttggagatgaaggaagaaagttttaagagttaggagatacaaatcagcttttgcgcttgaaggttgggttccgggcagagccactgaggcggttgcagaggcttctggcaggaggggtgccttagggtggggtgggtgccctctggcttttgcagttgctcttccacagtcctctcagggcttcattcttcagtctacatggaagttcttttttggctttttgttttggtttgtttttttgagacgagatctggccctgttgctcaggctggagtgcagtggcgcagtcatagctcactgcagcctcaaactcctgacttcaaggcatcctcccacctcagcttctcaaagttctgggattacaggcatgagctaccatgctcagtctggaagttcttttttgaaaaagcacaaggtcactacttagatttctatccacacagcctagtggacatggagataagacagtgaacgctttccaggattttatcattggcattggcttatggttgataattttattattttcatctataatattactagaaacatgaaataatatagtcatgagtaggattttatacccagatcttttagtggattccagtgttaaatcctaggcaaatgtgaagcttgttattttaattttttttttcttttctgagcaactgttcttaaatgcatttgtggcatttgttttgggttattaattgatgaatagatactgtttcagccattactgtatgttacttttacataaactgtaaaagtacataagttgttatacatcgatggaagcagacatctagacaactacaatgtgatttgtttctgggcagaatttttctattgccaaatctactttaatttgaaattttaagacagtagtctatagatcatacaaagtacctttctcatacttttgctttcctgacgtttgtcttctgctttattatttttcttcttattctatttctgcagtattaggtgggcaagagaagatattttcagatctttcagattcatttaaagtgcagctgtcttccaccctccattgctggttcatagagcagaaagaacaccagccagccagcagctgttaaaaagaaaacgaaaaaaaaaaaaagtgactgaagaaaaacagcagttttgaaaaccatagaaaaacatttgtcataatattttaaattaaaagaaaaaaaccaggccaatgtttccaagactagcttagggtgaaataataattaagaccttctgaattgtgctttttggcttattattcccacatgtggatcatcctgaaacaatgatttcttggaggtttgagtaagttttatatgtggttgagtttaggaggagtcacaggtgatttgccccatgtgggagtgcccggtggccttgctggatacttggaaaaaggagagaaatagaagaggatggtcggcttatgtaatgatctcaggctgattaatttggttttactttcagcctctttggtgctagatatcaaaaggccagagaacagaccagagattgctttctctcaaatatatgttctatccccttgccattttccccttaaaatgaaaatgttctccggaaagactaagcatcatgactaataagcatgaattagccagatcatcaaacctctgccctgatatttggaaaaatgagatttgtttggggaggagatggggaagcaacaagggtttatttgtttttgaagaagcagagctggaggatttggagcagctgtagggtggataccatgagcactgtggtaaaaatctaagagggcttgcagaatagtagagctaaaacccccacattttgttaatttgccagtttggctggggattggtgtagttgtttgatactggtgctgaatctagtttgaatgtctgcatgcagactcgtttcctctgggtttgggctggggtgggttgggctgagctgggctgagctgggccaggcctcctggtgtatgggagatggagagataatcacttgctgcttacccactccacttttctaattatcattgccctcagtcctcaacaggatttctctagcactgaagcctgaccataatactcaattgcaggtctgctccacataaaactatgtaactagaggtaagtgtaatttccttgataaaagatctagggtgttggaaacacattctgtggcttaaatcaagatttaggtcaacaaaggagtgtttggcaattttcctccagttctctaaattgtaatgttcatgctctggaatcttagcaggttttaaaaatggaagatcaggtttatattctgctatatcactaccctggttctaaaacagctctccaagagatgctgcttttcttagttctttattctttcgcatgagaaaagacatttttttatctaaattgtggcctggcgtggtctggcttatgtggtcgcacatcaccttcacttgactaattgcccagtggcctgtctgggatgttcagtgagaataaagtaaaagaagagtgattttataaggagcatttggacagcttattgtaaactaaaaataaacatataaataacagagtgaaattgccttatatgtttttgcctttgtttccctgtagtttccctatcagttctagctagctagctttgtagcagattttgcagtattttttgtgtgtgacaatacctttctttgagcacctgaaaagtttacccagggtatggtggtgtgcttgacagatatttaagtaagatgatcaacttgggagaaaagttgtggataaatgtctattcacatataacttacagcttttaaataggaaaaataatagctaatcttaaaatgttatttaagagaaaactgatgggagcatgtcacaaggacccagaggccagcttgtgacaaatctgagacaatttgatcaacggaataattaaggacagaagtgaattataaaccactgggagaaaaacaggaatccatgctgaagatgaatgggggagaaggaaaaggctcttgctcacagtagaatgccattgccaaccagtaaatgtggagttctttaggatattctggacaataaggccatttaaaggagatatttatttctctttagtagttaaaatatgatgggaagaatctagggttagaagggctggattgaattttggcacttgataactttgaccttgggttagtcatttgtcctctttgagcttgtgtttgctaacccataaaatgggggagtggttacatctacttttcaggttgaggataaagttaatgcatgtgaaaaggctttatgtactaatgcattcttgaaacaatatgactgaaatagtgatacaaggaacatcacttctgtgtatctttcttagaatagaaacaaaatttgtaatgtaagcaacttttcattaaacagatattcagaaaaggaatgatattattagaataaaatattaataaagttaaaatagtgactttttatgctttctgtgtgctggacactgtgcttatcacttaccatctattctcatttaattcttttttttttttttgagacggagtcttgctctgtcgcccaggctggagtgcagtggcgggatctcggctcactgcgagctccgcctcccgggttcacgccattctcctgcctcagcctcccaagtagctgggactacaggcgcccgccactacgcccagccaattttttgtatttttagtagagacggggtttcaccgttttagccgggatggtctcgatctcctgacctcgtgatccgcccgcctcggcctcccaaagtgctgggattacaggcgtgagccaccgcgcccggccctattctcatttaattctaacaacgactgccggaagatggtaccaatgtggctactgatatgtagaatttgagtaaatttttcacacaacttgtatctggaaagccaggattcaaattaaagcctaactgcaaaatccatgctgctaaccactgtgctatactgcttcccaaaagaagtctttaatcagttttctctcaacaaaaaggaggggcatccagagtttttggtagtagagaatgtgatcatatgtgcaccagctgcatgagttttggattgcgagtccacatctgcccttgaagtgtttatggaggcttctgtttatttcccattgatcagtaattttttttttttttcgagacagaatcccaccctgtcaccctggctgtagtgcagtggcgcaaccttggctcactgcaacttccaccgctccccgccccggccccggccctgggttcaagttattctcctgcctcagcctcccgagtgtctgggactacaggcatgcactaccactctcggctaatttttttgtttgtacacacacacacacacacacacacacacacacatacacacacatatattttttttttttttgaaattgagtctcactctgtcaccagggctggagtgcagtggcacgatcttggcccactgcaacctccacctcctgggtttaagtgattctcctgcctcagcctcttgagtagctgggattacaggcgcccgccactacacccagctaaatttttgtatttttaatagagtcagggattcactatgttggccaggctggtctcgaactcctaatcttgtgatttgccctcctcagcctcccaaagtgctgggattacaggcgtaagccactgcacccggcctaacttttgtattttttagtagagacggggggtttcactatgttgcccaggctggtctcgaactcctgacctcaagtgattcacccaccttggcctcccggagtgccaggattacaggcgtgagctaccgcgcctgaccataatgttctttattagataccaagtatctcattttcgtggaatatatttaattgcatcaaatataaactcagaatgagctgaatataattaattcagctgcagttacaaattaaagatgcctgggtgacacctaggttaatcatttacatatcaatcgtgcaatagatgaatagacaccataggctaactgctctttgtgtaatgactacctcttactgtgtgcttatggaactttgttaaaactaacttgtgcaacgttgagagacaccatagcacggtggctaagaacttggactgcagtgccaggctgcctaggtttgaatcctgtcttccctggttattggtgatacattctctatctcattctctatatctcattttccacttttataaagtagaggtaatgtagtacctaggatcagagttgttcagaggattcaatgagttaatatctggtacagcttggtatgtggcacttggtacacacatgtataagcaccatattaaaagaaaatctgagaagtactattattcctattttattattaaaagtgaggtttaaatagtaaattgccctagttaatcggctagtaaataagcagaatttccaattttggaactgagaaactaaaacctgcttctgactgttactatacttcatgtgtggcttttgaaggtatttttttttctcctgatgtttttaggttataccctgaagtttttttctacctctaacaactctcgaagtctctaataacagagcaccttccttctgtggaagtaaagcagataaatacttggcaaaagaaaggaaactaccagggtgaaagtaggaagagaaaagacagagagggaactaggtttgacaaactgctgtgtgccaccattcttgattctcagagtgctgttaagggcttgctatccctttggggaaactgaggtgggaatttatgccacctaaattcatacagctaagaccgtgggctatcttgatcccaagccagtgctttttccatgacaacatgcctcttgaccaaaaaaactgggccctgtaaattttctgtaagcttactataaggccatgccagccttttccatgtcatttggatttatatctgtatactgtcaaagaatcaggaccaatactgtgtagagttttttgtaagtgaaagggatgatctctagaaatttgacttaagatgagaaaaattgaagttcaagttccacagctacttagagacatagatagggccagacacctagctctcttgccagtgcatgtagtaaccatttgtcttcctgtacctaggctgtattcacccagaattgctgaaggttttgacttgttatatctgggatgaggtataagaatctgcctttttaaataagtatctaattcaggtgcaaagagtctgagggctgaactttgagaaagactggtttatatgaacccacttatagtagacaggtcaggaatagcaatacaatttacaaacatattgaaaaaacattcattctggacctattaggtgccagacactggcacctatttcctttcaaaagaaagaaaatcagttctacccacaaaggcattacagtccaggtgaagtaaagtcaacttagcaataaaatgttgcagatgctacaatgaaagtctgtgtagggcacactgaggcatagggaggaattcttttctaccaggggtggatagaaagaccgggaaaggcaccatgggagtgctgttagaactgagacttggaaatatggccaagtgagcaaaggtgcagaagtatgaaactagcagatgaaaactgcaaaaagccacaaagataggttgaagcaggaatctgaactaggttatggagtcatagcagacgttctgtgggtgcccagagaaggtatttttcaagaaaataatctgtggtatacaaaaagaatcattggcctggcattatctaggaagttggattctcagaagttgagttagatttaggtgatttttaggtaaatttagtggcttttgtttaatgctttatgatattgttgaatgaaattcatttatctatgtcaaattatgttcacatctttgtcttttaatatatttgtacttgagtaactatactcccagaaagtaaatactaccgtgttgctacctttaggcaaaactatcataccttttaaaaagatcttgcccccaaaaaaacaaacagaaggatggaaaaagaatttaaaaaacaacttccacagtctctttccagttttatagtactgagtgattgtctagtggttatgagcagaccttgattcacatcctggccctcaattagcagctgtgtgaccttgcatgggttacttagctaggctgagcctgatccttcacctgtaaaacagagataactgctgtgaggatttagtgatagacacttttcccaatgggcaaggacagtgtctgtcctgttgactcatacctgcagtgccctgcatgatggaggcatatatggtacccagtgaaccttatattatagaccctccgtactatcacctcatcaccaataagcagacaaaaaagtgccaccactcaggggtttaggctgttatatattttcattaaaatttaacctctattgaggttccaagaatcatttcttcagcgtaaagtttccctgacatatgctgaggtaaggaattttatttcataaatgtgtatactattaattttaagtgttcttactcttaccctttccggcacttcctacttgaagtgtctctgtttagaaggtcactgaacacactctactggggacatctgtctcgtgtaggcatcatattgggcacagctgctctggcagcttgccctccctttctcacaagaattgctgcagctgactggctctggggccattctgtccctagccctgggcctcctttctgcttgtaggtggcctcactgaaatgtcctgagattcaacttagatgccatctggggctgagctttggacattacaaaactccaggtgtacatgagcagcattctcatccatcagaagacttgcagaatttagagcaggaagaccctgtggagagcaagtttcttgctcttttgtgtgaggaaactgagtccctgagacattaagtgattggctcaaagtcacaaaggtggttacgggagtcaggactagaactaaggtgtcttgactctaacctaaatgcctttaccaccttctcagaactagaaagcatttctgtactgccaggtaacaggtagcttgtgtccgttacttcttttttttttttctgttacttctatatgggcaaacatatatcagaactctcttgcgtgtttaaaaaagaaaaaagctgctttctcacgaacatttggtgggtcacagcccacgtggggatttgtcagactttgtctcattactagactactttaccactgacaacttggtgatagaatttcaagcagtacttcaaaatcttaaaaaagctctcacatctagagtttacaggaatcctttccagagctcagcccctctctacaattttaactgttctttttcatgcttttccgtgtaccttagcaacgctgaaaagctgagtataatagcagaatcacaaatatctctgaaacttttgcttcctgaaacattcttagttgggtttccctgttgactggaaaagggattttatttttaacagagatgcacagtttgaaaagcagagttaacgtcactgagaaaaggcagaaatctgaagatttttttctcctgagagaaaaggaaaagagatcaggaaaagaagatagcttcagccttttaaagacataacacaattagacattttcaaatgggtggagaggattggtgaaatcacctaggggcgttttttcagaatatatttgaggggttagggtgggagaaaagatttgggtttttaccagagttagagctcctaggatacaagaaggacatacatggtctgatttttaaataactcggaagaaattcatgtgtacaaagaaagatgttttaacattgggctcttctttgaaagcagattcttattcaaattaaccaataggagcagcccttaaagagggaagtcccacactttagccatattttgaagttaccaaacaagggtcaccttagtgcactaagaaagtggttccccagaaaagtctacgttcccatatttgttttccataaaataggaacagcccgagacatagaacaagtcagagggaaacactgctcaccctctctcccttcctattggtgatctgagttgggcctgcagtttgcaaatcctcattctttaggctggtaaatctctcacccaagaaatgagaattgcacaaagaaagtgtgcttaaacatgaataattatctgaatgtttcttctttcctttttgcctaatagaaaacatattttaattattctttactgaaatcttgctgaaatgaaaggagcatgaagtgggggtagagcgagagacatctgggagagaaccacgcattgtccttcaggattccacacagggagagaggcctgggccttgttattttagagcagcacgtgtgtgtaggcttaacccagcctgactaacttctatgtgtctcctctctgccacattaatacttctttctagggctggcagctgttccagacctgtctctttactttcctgaatttaattagtcatcgcttatagttagtgtgaacatttattgtccaagccaggaggcttgaaattgacaagagtcacctattactaattacattggacaacaggtacaaattgggactatcccaggcaagctagaacttacagacaccctacttatacagtctccagggtgggtgtggtggctcatgcctgtaatcccagtgctttgagaggctgaggcaggaggatagcttgagactaggagtttgagaccagcctgggcaacatagcgagaccctgtctctacaaaaaataaaaattaactgcgcatggtggcaggcatctgtagtcctagctgctcaggaggctgaggcaggaggatcgcttaagcccaggagtttgaggctgaattgctctgtgatcatgcctgtgaatagccacagcactccagcctgggcaacatagcaagaccccagctctaaaaataataataaaatttgtttttaaaaaagcaaataaggaagtttttgtaagtgctgctgtggaccatgtggtagtaattaccagttagaagatacattggagaagaagcctcatttaatctcattgaaaatagcaacaacttgataaatttaacaagaaatgtgcaaatcctatatgtggtgttaggaactgagttgcatgccccaaaattgatatattgaagccctaaccccaagcaccatagaatatgactgtttttggagatagggcctttaaaagaggtaattaaattaaatgagaccatgagcatgggccctaatgcagtctgactggggtctttataagaagagggatgaaacatgcagagacctcaggagaaaaggccatgtgagtacaccctgaggaggcagctgcctgcaagccaagaagagaagcctcagggaaaccaacctgccaacactttgactttggatttccagccttcacagcaacagtgagaaaataaatttctgttgtttaagccgccagtctatggtattgtgttacagcagtgctagcaactaatgcagacaatacttgtagaacacaaaagtaggcttgaacagaccttcctacatcttcagaagggcatttcagcatcatcaagatattaatctttacttaatttatgtatataatgtgacctcaataaaagtattaataactttttttaccggaggtaaacaaggtgataactgaagtcatatggaaagcttaagcatgcaaacaaaacactgaaaaggaagaactgtgagaggggctggcccctatcggatattaaaatctctataaagcctttataattaaaacagagtggtactggggcacagactagaacaggatgaaatgtagtggaattaaatgtctaaaagactcgaacatttatggaacttttttaaagcggcaactccaatcactgggtcaaagatgggcttttaatgaatggtgttggggttaactggctaaccatttagagaaagataaaattagatccattcctcataccacaaataaaactaaactccaaagggatcacagagctaaataaattatgaaactttatatgcactagaagtatgcatggatgaattcctccttataatctgggtataggagaaggctttctaggactcaaaaataaatatgcaataaaataatatgttgataaatgtgcctaccaaaaaatatacataagtgaaaagacaaatgatagtcatggtaaaatatccacaacatatatcacaggctagtatctctagtatgttgttttttttaatgaaggatgaaaataccaaaaataggcaaaaggcataagccaacagttcaaagaaaaagatagaaaagcgctgtctgaaatacatgaaaagatgatcaactttcactataagagaaatgtaaattaaaattgcaccaaaatgtcatttgtcacccatcaggttgtcaggattcagaagcttgacagactctattctggaaggtatgggaaaaaggcactcctatgtgacagtgcaaaatggtgcaaccattggaaaggggtacttgacaataacaaagttatatatacatttacccattcacccagcatttccacatctaggaatttgccctgaagatacacctttgacagtgctaccatatatatgcacagtcattgcagtattacattttctggtaaaatattgtgaaatacctgaatggccagatatgggagattgttaaatcacctttggtgttgttatctgtcaaaccacatgaggaagacctctgtgcactaatatgaagtttttctcatatataggtgaaaaaagcaaagtgcaaaagagcctatatagtaggctatctttctttttagcagtaaagacgaaataagaaagcatccatttatctgcttgcttttttcaagaagaaacacaggataagccagaaaaaaatgaaattggtgaccctaggaggatgttaaaattggaggactaagttagaagggatgtggtagggagtatattgttttgactttaaaatcatgttaatgttgatttaattttgctttttaaatacacacaataagaatgagagaggggaactcctaaaactaagcgcaaatagcaacagatatattcaaataaactaactgtgaaagggagaaattgaataaaatttcaaagtaataaaataacactgaagagaagagagggatgaatccaagtagattttgaatgaatttgaatgaatccaagttcttagtataccaaaaaaaaaaaaaaaattaaagagaataaacccaaaacttgtcttagtaggtttattttataatttctgaaattttttcagtgtatcgtagaattaagcacattcataaatattttgatgttggtagccaaggttctcactgttgaaataaggagatacagataggaaatagagaaaggcaaatgaaaaccctgtggagttggcttaacacttggatgtaacagcataacccaatttccagtacacacacgcacacacacagggcttagaatcaatgtggctccagtagacatacagaagacagccaaatcccagattttggtttctaaatactattcctcactaaagggaaccagagattgctggagtggtggaaagggaaggtaagagataagcctggaatgtcttgttccagaaattaagaaatactcaaataattggaacatgttacaaaggcacagggactagcttgaacaggcacccaatggccaaatctaagacaatatgaccatcaaaatagataaagatatttatagattatagctcattgattaagaatccatgaagccatactgatgactgttatatataggcatatagacacaagagatggaaaagcacgtcttcatattagaattctgactaataatgaaggaataatggagttaaagaaaattcagttcacaaccattatagcaaaaatttattcaagcaaaatggatgctaaatataggggataaagcttgataaggaacaggatatttacacagtctcgtggtatctctcactacttattaattacaaaaggaaagatagagactgtctacggtggaagaaatgcacaataccttaaccaagtgatcaggattaaacctcaaacaggcagacacatcgtgtgcttctgtgcatgtgaactgagaagggaatgataccacttatctagtagtccaaccaaaaatctcagagtttaatcacggggaagcattagagggacccaaattgataaacagtctgtaaaataactgcctgtattcaaaaatgtcagtagcatgaaagcaagaaggaaaaaagacgctgaagaactattccagattacaggacactaaagaaatatgacaacgaagtacaatatgtgattctaccttaggtcctgtatcaggaaattgctacataggacatggttgagacagttgacagagttggaatatgattttatattagataaaatcatcaatgttaaatttcccaagtttgataacaaatgtgtatatgtaagttaatgttccttttgggagttactctgaaatgctatagggtaaagggacatgtatgttacctgctctcagataattcagaagaagtgtatttgtgttctagggctggggaatggaggagagagaatgagtaagttaatgtggcaagatgttaaaaattggtgaatctgggtaaagggtatttgagtgttctttgtagtattgcagtttttctgtaagtttgaaattatttcaaaataagttaaattttttaaagttcatagaagtttttataactgcctcaaactggaaataacccaagcattgagttggttttttttcccccaacccaagtatttagcagcagaagataaaattgtatcatcagataaattgtagtttatatatataacaagatgctacacacacacagcattggatgagtctcacattttgaggaatacatatgcagattttcaacttgggaagcagaaatacattgccctttgctgtggctattgcaaaggctagttcttcctccctcactgcccccatctgcaagtagtaggaacaagtaagtccccagttctaaaactgttaggaaacaagagctgctaaaacagatgctccactaagtgttaggctggtgcaaagttgctgcagtttttgccattaaatgcaaaaactgaaattatttttgcaccaaccttaatggactctgtgcgtgtgtgttgtgagagggaggggtcctctgaaggatagaggacatgaaggattgctgtctggtgctgcatttgtggggagtggtttaggggccaatgtttcccccttttaagggtaaaaatcataattgagaccatagctagatgcctgtaaaaggcaagttgggaaatggtaattcaagtcacagcagctaaaagaaaagggaatgtttgtcattgcaaaggtaattgaaaggtattggactgttttggaatataaatttttattggcattggggatcccttatcaggaatgtttcttcaacaaaacaaaagcattttatagttcagatgactattgaaaggtagaagaagaatttatgcttttaatggtttggtttgggaagattccatcactgtactaaaaagaaaatacatttattatatactcaaaagatttgttcctgaaggatcaaatagggaaataacaaatctgatgctatgggattatgtaggagtataaaatatagcacatgagaaattttaatacttttttaaaaacctgtttttatctaaaaagcaattttcagctcataaaaaagtgataatccaagtgttaagagcactttttactgtagaaatgatataaattatgcatagattccctggaaagccctcaaaagtctgctaaattcctgttgccaccaaatattgtttctttggggaaatatattctgattcctaacaaccaacaataatcataagttttaaatctctcctctctcctctcatgcagtttatgaaacgggctgcttttctgtttgtagctgaggccacaggagctggagggattgcaaagacctttattagagcatccatctggtgaccctggcagggaaacttaggatctaaccctaggatctggctagggctctgtaactgactgttagccagccctgcctctccaggataattatatttatagtggctttgcctcaggaggtttctggaggttgatgaccatgccaattattaactccttagcttcctaatgtagaacatttaggagtgacaggagttgttttctttgcttctcaacaggtgcctacctattgggccgcctttgtaccttgagttttcagttagcaaaatgtgaattgtatgaactaattcttccttgacctcacaggtggtggtaaggattcttgaaaagtgggtaagatccttagaaaaaagatgttcataaagtgtgactcctaggacaggatacaagataaattctgtcccacaaagcacctcatattttgtataattaactatcttcatggcatttgcattttctacagttcactgattttacctcttcagctttatttactatgctgcttttttgtgttaaagtgaattagtgtgtcagcttaaaacacttgtggtgaataattcatatcattcaataagcattaactcttaaatgtgaagtcttatcagccagggctgtgaaatataattgtcaatggtgataaacaattatgctttggtttttagtgaatgaaaaaattaagaatgagggaaccttaacatttttaacctaaaagattgtattttgccaactttccttgggcaatttgtgaatactgcaaatctcaggcatatgtcatcagtgattctaaagggattgtatttgttcctgcatttgttcttgagggtaaaatagcttttcatttgaatgatgcttttgagttggcagcaggacagggatcagataatttgttgttgtttacagattatgttttactttattgtgatgtaattatagatcataattctcatgtttgtccttctcttttttcccttcctttttctagtacttcctcctgtgctggttccaagacacagcgaatataatcctcagcacagcctcttagctcagttccgtaacttaggacaaaatgagcctcacatgccactcaacgccacttttccagattctttccagcaacccaacagccacccgtttcctcactctcccaatagcagttacccaaactctcctgggagcagcagcagcacctaccctcactctcccaccagctcagacccaggaagccctttccagatgccaggtaggttggaatgttcagtgatgttctgtagtcatatcagacagtgttatcacagtgtcacggaaaagctgggtcaacctgcagtggagggaggttttcagccctggtatatgacatagtgctctcgcacttttaggatacaacttttggtgaaaggagacctcatagtcaagtaagcaaatgtcttattttatttgtcaggcacagatgcttgaataagctatattttccccttgtttttaaaaggttttgaaacagctgcatccttctgggagtggcataattgttacagtctttactcttgataaaaagaaaaataccgtgttacacacatttgctcttatgagaacacaacctcaatcagcatcgttttcatacatggaaaaaactcctgttgcaagtgcaacctcagaaaaaatatttcctgagggatcccaccccctacttaattaaattcattcaaatgatgatgtaatcccaagaaacgtatactttaacaacaaaggaattacaacagaagtactggaaaccatctgcttgttcaacttagcaaagacaaaaaacaattatcctctttttctagacataactgttggtgtaatggttatcaaaataaatgattaataaggacattatatatttttaagttacaggttaatgagcaagcatctccaaaaaaaaaaaaaaaaagagtgccaaatttcttgccagtagactttaagaaagataccctaaacaaaaatatacttaacatctattaatgttttcggaagggaaaatgactgggcaagtgtgtttattgggctgcttgaaatgtttttaagtaaatttgaattcaacatcagtgctaggccttcaaaaattgaaaagtggtccacatttatattgctttcttttatttatgtatttattaccttcttttatttaaatcttgtttatttcacattgttttgtccggttttcagtccaaagctgtttgggatgagggttgggagacagactagtttaaaaatcaaagtaactggtgacttcctgtctacctctctcccttcctcctcaccactaacctgtatgatgggcaggttagtggtgaggagatacatttcagaagacttttgagcagtggcagcccagagtggccccaagattgaattaaaggttattgcttgaatttacactttgtccctaaatgtcagggattaaggcaaaggccaagtaatggaaatatggaaaacagttgcaagggatgggaggaggtgcctgtaggaatagtagaatagtatcaagaattatcgggttcctcttggttgtgctgatgccataggttgccaatgaaattttcaccagcttcttggcagaaattcattgacttgggctcagaggaggctctttgtctttgttcctggcttgagataaagccgagtcagccttacagctgcagagaagaggctgaattaaaagaagctgaaaaggggcaaaagaggcatccagagaaggtcccagtagtcccatctcagtactatgagttgttgcttgttagcagctggatgtgaagttaccaggttgtgattcagctggagagtgagtcttggaaatcactggggctctctgaaggaacaacatgagttgtttgtatttgacagttgctctgagtggtctcgattacttatccaaacattcacgattccctcaggtaaaattttgtctccaaggctctgacacatatgctagatgggctcatgatagctagtgaggagcttgcttttggatggaaaaggattatttgtgagaaacctataccctttgttttatattaagaaaatgcaagacttgtgttagtgttctttgtttaaaaaatcatgtttgcctcttatttgccagaagaaacatatatgtaaattctgaaataggagatagctgtgataaactgattcattttctgttattctgttactagagattttaaagctagtgattatttaaatgagtagggagagtgtggtcctaacagattccctaaagtcatggaaaattaacagttcaaatcagtaggctataatgaaacttggtgaattttctaaaagcccatagatttaatgcaaaagaccctgaagctccttttcttaagaagtccagtgaagctttcagaggttttccatctatcagtgaaactgaaatgcagaggtcctctcaaagcagattatattaaagtgtgcttaaaatactcttctgattgcttttaaacagcatgatcctgcataggcaaacagcttctggaactggcatatagtataattcttttcctcccactgaattttcacaaaaatgtatatgattgtggcatggttaatacttttcagaaattgtacatcaaggcagtgcctgtagcctttagtcttttaatggggagattgaaatgacaacttgatctcttgagaatttcagtacagaagaggatacgtgttttgagcatgtatgtttactaagggttaagaaataacttctttaaaaactttgtagctgatacgcccccacctgcttacctgcctcctgaagaccccatgacccaggatggctctcagccgatggacacaaacatgatggcgcctcccctgccctcagaaatcaacagaggaggtaaaactaattgctgcctgttcccttttttagagtctaaagtttgtccagatgttactttctctcacaaatttttattagtctttaaaaagagagctacttgagaaaaatagagtccaatgttaagagaagctcactacaattgctggataacaagtaagtctttaatttaaagaacaaatacactgacttaactaatgaagatctgagaataattttgcagttatctgtttagatctttaatacttaataatttttaactgatgatgaaaattttttttttgtttttttttgagacggagttttgctctggtcacccaggctggagcacgatcttggttcactgcaacctccacctcccaggttcaagtgattctcctgcctcagcctcctgagtagctgggattacaggtgcacaccatcacgcccgactaatttttgtatttttagtagagacagggtttcaccatgttggccaggctggtcacgaattcctgacctcaggtgatccgcccaccttggcctcccaaagtgctgggattacaggcgtgagccactgtacccagccaaaaagagtatttttaaatgaacaaaatggtatttagaaacaataagtataacagtactgaagtagagttttcactggtgatttccaaagttggaagttggtataactgggctgtccaaaggctttcttctgtaattaggatagatacacataaaccccgtctgtttttcagctcttatgtatgtgcaactacaactggaacaaactaatagaatttcttgctatttgtttctaactttgttactaaaaggaattgaggcacaagtttttccccttctcagcctgaagaacttgcaagcagaaatgaaaaatttctttccccctttagtaaagggtgggtctttgattccagcgctgtatatatccttagcagtgaccgagtggaggatgccatcattcttccagctctacataggcaagtaggatagacttaagtgagcagagaactcaggtaaataagttcggtagactctctgagaaatctgttagaatccacagccaccctggcaaataaaactgctcctaaataacctctcatgaaagaaagtgctttgctgctgcactcaacacatggcatgggtcatgcaatttatataatgtttatgcaaattgaagttaaagtacagtttggttactaggtatgtcttgtttcattttagtgcttttttattaaaataggagatacttattaaaataggagttgcttatatttttaagtacttaaaattgattttgtctctatgacacattatacagtggtaactgcatgtcattatacatttatccaaacccataggatgtacaccataagtgaaccctgacgcaaaccgtagactttggttgtaggtctgtaggatgaatgtcggttcatcagttaaaacaaatgtgccactctggtgggggatattaataatgagggaggctaggaaggtgtgggggtggggggcatatggaaaatcactctgtcttatactcagttttgctgtgaacctaaaactgctttaaacatcgatttaaaaactggtgatgaaggctgggcgcggtggctcacgcctgtaatccctagcactttgggaggccgaggcaggtggatcacctgaggtcaggagttcaagaccagcctgcctaacatggtgaaaccctgtctctactgcagatgcaaaaattagctgggtgtggtggcgggcccctgttgtccgagctacttgggaggctgaggcaggagaatcacttgaacccaggaggcagaggttgcagtgaactgagatcacaccattgcactccagcctgggcaacaagagcaaaactcagtctcaaaaaaaaaaaagaaaaaaaaaattggtgataaactcaaaggacctttcttggatgtgcagtgtcataaattggaatgtacaccactttaatcattatgattttttaaatcttttttattgcctctgtattttatggttcctgattatctcttgaacatcttatcaaacataattctgagtcaatgaacactctggttgggggaaataacccctatctcacacatctgtggaatttatatttggggaccaggataccaggagagaataggcacagtaccacactattaggagcatgtggacccagtaactattattactaaacccaaaatgtctgatttcaggaaacagatctttaaattgctttaagatttttttcatttaaatagctttaatttttttttcctttatagtttatagtcagttaatattttcacgaggaaggaatgttggccattttttttcttccccccgctttttttttaacttgtttttaacctttggtgattttcctagagcaggggtgaacaaactacagcccacaggccaattcagcctgctatctgtttttgtaaataaagcattattggaccacagctgtattcattcattacatattgtctatgactgcttctgtgttacaagggcagaattggatagttgtgataaagattatacagcccataaaatcttgctggcctttcacagaaaaaattcatcaacctctgacctagatgaatagtattttgaagtatcctgatagctgataaaagccttctgctaataatgttgcagtctgctttaagatttggcacttgtaaatcactaaagttttgctctttgaattatagcaaattgatgtggtagagttgcttagcaagcagggaagatagtgtatgtttttagctaactacttacatatgtaaagcgactaacttatgtgtgggttttttcatgagtattttccttgttttttttttgtgtgtgtgtgtgtgtgtgtttgttattgttgttttgttttttaccaaattctaaagtaaagtgcattttagtatttgtggaatttgatgttaagaacacagaggtgcttctcccttagcagttgtagtctgggcttctgatgtggactttctttcttttcctccttttattattgtacacccaagacttcataaacctcagatcattatatattggtatgctggaaatatatggtttgtattcctggaatctctaaaggagtggtacaagaggttttactacagaaggaattcatctttaaaaccttttagttgcaaatgtttagaaccatgttctgtttggagatttgttagtcttaagagatttgacttaacaagctgcatcctgtcagtaaagttgggtaatttccattgttggcccattctgggaatggagagacaaaacacacctgctctgcatgacttaaagcaaatataaggaagttagcatgaaatctggatgagaaagatatgattcattctgtaagaatggccagctggcaagatttcttcctgagtttgagaactggagcaacactgtagctgtgatagttattggcaacttaatatgaggtaaagtaacttcttatcaataattagaaactgattttcatggctttgaataagcataggcatacttagtctttgccaaaagtaattcatttttatgccagtacctttggcatattttcagtcttctattgttctcttcccacttattttttcacttgtcacttgtgtttctttagatggtgagccaaagtctgtggtaggggtgatttccatttctgcatattacagagcaattagcatattgttaatattcagcaaaagtttttgctgtgcttccttagctggtgttttggttatctgatagtaattggagaaaattgttctccaattttctccaattaggagaataaggagagtgtcatattaagaagtacctgctttaaacatcatagaaaaactgtatacattataatagcaattgcttttccagtgtcttcattccatgatcctgagccaattcaacaacacggtttcagtttttgagagcctgaggcactaaccttggttgatataacattttctttcctctagatgttcaggcggttgcttatgaggaaccaaaacactggtgctctattgtctactatgagctcaacaatcgtgtgggtgaagcgttccatgcctcctccacaagtgtgttggtggatggtttcactgatccttccaacaataagaaccgtttctgccttgggctgctctccaatgttaaccggaattccactattgaaaacaccaggcggcatattggaaaaggtgagtttttgctttaacctctttcagatgtttatctgttgtgtccctgttcctccagagctgacttaaaatcattcctgtaacaaactgttgtagcaaagaccaggtaatgttcacttgctgcagtttgtaaatatttttccagtttctgctatctggaagctcttgcagtcagtgatttttgtggtcgatcaactcataatattgaaattaattagttgaaattatgatttgccattttaagacactattctgtatgatattttgctgcagaataaattggctgttataaaatgaatcacaacctaaaattaaaagcaaattacagttaattgcttaattgtatttcaaatgaataccataactcagtaaatagaaaagaaagaactagattttagcacaaacatcgtgcaaggtggcacgatagaaccctgcagtgattgtacccccacagggacaccaaattgaacaactgtccatataagacagcaccttcaaaagaacaaaaaatcaggcatggatatatttataataagaaaaaataaagaccaaaaaacaagcctagtaagttatgaatatagtaagtgactatatatcctcagcctaggctgagtggagtagatagagtaggggtaggatttcaaataaatcccgaactctttttagtaaacttgattatttcatagcagtatgagtgaaaccattctgaaactttcatatgtaaagatgaagcaaatgactaaatgtgtggatattgttgggagcttgggtttccactgtggaaaacagacatataaatgcggaggggagcaaaaagtaaaccctgtgaaggagaatagaagtatcagtgcaaaattctgattttagtaatacatatgtgtatgtatgtatgcatgtttatgttctcatgtattacgtatgtgtgtatgcatgggtatgtatatgcgtttttacttgcgtatagtttctgatctgcctgctgaaagggcccagaagcatacatacccagtagcaataagcacatctagtgttcagatcatcatcgctaataccatgtcccactaaaaggaactagggctccttgaagaaatggcttacccctaggctgggataggtaggcataggaggaccctggagcatcttgttgtggcagaaagtaaagaagtgcttatggaactcatggggcatgcctcaggagccaacttagagggccttccactggccaactctcagacaatttgagctccaaaataattacagtgatgaattttacttcattttatttatttatttatttatttatttatattttatttttttttgagacggagtctccctgtgtcacccaggctggagtccagtggtgtaatcttggctcactgcaacctccacctcccaggttcaagtgattcttgtgcctcagcctcctcagtagctgggaggttacaggtgtgcaccaccacactcggctaatttttgtatatttagtacagtctgagttttaccttgttggctaggctggtctcgaactaacctcaaacgatcagcctgccttggcctcccaaaattctggaattacaggtgtgtgagccactgtgcctggcctcagtacggtattgaattttacaccattgaaaaacaatacaaatttataagtccatactcataataaatagatagataagtgaatggggaaggctggttgataaatgtagagtcagtgctaaagtttgaatatcattttgcaaccatcatagtaaggatcaggcaagaatcatcaatggatgctaaatataaagaaaatgtttatgagaatcagtttatttgcatggtcttaagagtgtttaccctcaaactgcctgttagtacaagggagaataaaaagcattaactaaacagtggagaaaccgtatcatttgtattttaattgtaattgtataattgatgccctgttttgactgggagatcaaaattatcatcaccaatgagagacagatgggtatcatatacctccagatgtcataccctgagaaggccataacatcacctacgcaggattccagctgagaatgcaaatccgaatctaatcctgaggaaatatcagacagactcaaagcaagaaacattctattaaaaagggtgaagaagggggagtaattctttcaaaatatcaatgtgaaaagacaaaggtatggaaatgttccagattaaaagcagttaaagagatatgacacctgcatgcaatatctgaccctggacatgatcctgtgctgaacaggagaaaaaatattaatactgtaagggacattattgagatcagcaggcaaaactggaatatgaatggtagattagaccaatgttaaatgtattagcattgccaactatactatggctatataagagactatccctattcttaggaaatacttaagtatttaaggaagtggttcaggaagaaattagtgtataaagatacctgtctactcaccatctgtctatccaaaacctgtgttacaatacatacatacagacagacacacacatgcacggtgcgtgtgcagcagcagtggggaaggagagcccaagtgatcaagcaaatggagtaaattgtcacaatagatgcatctggataatggttatatgggtgttctttgttctgtttttctttgttccctttcaaacttttctacaaatttgaaattatttccagagtaaaagtatgaaacagtgacctactatgaaatttagaacagtggaccagattaaaaggttatttattagatgctttaaaagcactcaagataaagtgtaacatttaatcctgaggggaagaaaactccaactcttaaattaggaattgatagatattctcttatataattaaaggaaaaaactcttgactgtaaatttaataatgaaatgctagaacctaggttcataacatacatagatatctttctgtggtctgtaaacctctgaaattgtatgtaaacacaattttgcatacatttgggagggaaagacatacttttcgttaaactctaaagatgactcttatcccaaagtagcaaagaaaaattgtgctatgggacatttcctcctaaaacattattaagaaaataaagaatcttggaatgctgttatttaaaattgttccagatgcccttagtagtgtactcaaatatacaattatagataatggaaataaggcaagatgatcattatgtgtagatgatatgtttgattgacagtattctcgggatagattcttgaagtgaaattagtatatcaaaatccattgatatatttcaccaaattactttccaaaaagtaattccagtgctttgggaggctaaggcaggtggatcagttgaggtcaggagttcgagaccagcctgggcaacatggtggaacccgggtctctactaaaaattagaaattagccaggtgtggtggcacacgcctgtaatcccagctactcgggagacagaggcaaagttatcacttgaatttgagaggcggaggttgcaatgagctgagatcaagccactgctctccagcctgggtgacagagagagactctgtcttgaaataaattaattaattaattaaaacaaaagagataaataaatacagacatacataaaatgaatttgcactcctaccagaaatatatgagtgcctttctcccttcatccatgccagtattatagttgggcattgtgcctattcaaatgatatgattatttatctagaaacctccaaagaatctatcttttaaaaattatgtaagtcagtttcctttaatctggtaataaccagttagaaatataatgaaaggggaaatatccccttcccaatagccacagaaaacatcagtttcttggaaataatctgaacctgcaatatgtgagaattacatgaagaaaccaaattttactgagagaaagaaaatttgaataaataggcagtctgtgttccttaaagggaaggcttaatattgtgagaacattttaagcatattaattccatctaatttaatttataatttaaaacaactcttttcagaatcacaatgtgatttttttgaaaattggaaaatgtattctgaatattctgaatattacctggaaggataaacaagtgaggctagctaactttgtaaatggaaaagtaaagaaaaaattatcggcattagggttaataaaacattgtaaaactacaagtaaaccagtgtgtagacaaaacagaatgagttaaactcagactatactgttataaaaatataatgtatgttaaatgaagcatagcaaatcagtagagtcttctaatggttctacaataaccaagttagcgtttgggtgaggctgggaaagagaaaccctgacctcataccatatatgcaaacagattaatgagttgaatgtttttcaagagtcaaacaattaaaaagctagaagaaaatatgcttgatcagagaggtggaaattttttaagcataaaaagcaacaaaagaccataagaggtttaactaagagattgcaaacttctgtaggttaaaaatatgtcacaaataaaattaaaagacaaaggactaacagggaagcaaataagaaagtatatccttcttacatgaacagttcattaaaaaataaaacaaataggaccccagtgagataaataggtaagaaatgtgaacagtgaattcacaagagaaacgcagatggctaataaactacgagagcatatccagcctcacaggcaaattaaacaattatttgtcaactataaattagggacgttttgtttttgctctacactcaaattcagtactggcatgggtgaaatgagaaaagcattcctacactgctggtgacagtgtaaattgatgcattctggaaagtcatttggcagagttaatcagcagccttcgatccagtaatttaacttccaggaatctctcctaaggatattatcaaaaattgtccagagacatttatcatggcattaactataaaagcagaacattgctgtcatcccagtggtccactaatgggaaaatcatttaaaaaacattcatacaatcatggagatattttaaatgtttgcaaagacattttaatgatacccaaaactgaatacagtgtatcaaactattaataattattgcctctgagtcactaaaagagtgataatattttctgcttctttatattttgatttactttctgatttttcaggatgaaaatttgtcatttttatcatcaggaaaaattagtagcacacacactcttaaattgttttctctatatcaggccaaaaaaatggccttctgctctagcagctatttaattattacagaaatcctaaccgctgtgtatacatataaacaaaacttgtaatgttttctgtgagacacaatatagccttgactaagccataccagagttacctacaaggtggatcatttaaacccacatgggatctaacgctgctgggtgacctgtataaagtcatcttccataatggtgtggggctttgtgagaatgggtttttttacccctactttcctttttttaaaggcagggtaggcccaatttcctacactttaagcactctgggtctcacaggaagaagtttggagcaggtgatagttcagtgagatctaattttacacacacagtatgacttttctagtttcattttcatgtttttttactggatcttatatcttacagctttcggcaatacttcttccacctgtggctttccagttcctctcttctctttctcctttcttccctttctaaaattttccaaacatcttagctgtacaataaatgcaagagcgctttatagtaaatacatagcatccaggttttattatgctatctttttagagtgaaaatatactttcaatgtgtggccaaataggacattaatcacttaccaaaatgaaattgctacatgttgttgttgttgttgttgttgttgttatttgagatggtctcactctgtcacccagtctggagtgcagtggctcaatcacagctcactgcagcctcaacctccttgcctcaagcaatcctgccacctcagcctctgtgtaactgggactacaggtgtgcacccctatgcctggctaattttttgtatttttttttttttttgtggagatggggtttcaccgtgctgcccaggctggtcttgaactgagctcaagcaacctgtccaccatggcttcccaaagtgctgagattacaggcgtgaacaactgtgcctggcctattactatttttaaaacattttgttatgttattttctagaaacctcctagatactgtattaagtaatgcggttaactaagatttttatcagtcatacatcagccatccccagtctttttggcaccagggaccagtttcatggaagacaatttttccacaggggatgggaaagggatagtttcaggatgaaactgttccacttcagatcatcaggcattagattctcataaggagcacgcaaccttgatccctcccatgcacagttcaccatagggttcatgcttctatgagaatctaatgctgccgctgatctaacaggaggtggagctcaggctgtaatgcttgctcactcacctcctgctatgtggcctggtttctaacaggccacggactgatactggtccatggccccgggggttgggaactcctgttgtacaggacctagagaatagctagctaactagccaaagtttaaatccatgtatatttaagtttctgtgttgaagctgcacaggtgcctttgagctgtaaaaattaataataactaaatggtatgctttgtcttcctataggagttcatctttattatgttggaggggaggtgtatgccgaatgccttagtgacagtagcatctttgtgcaaagtcggaactgcaactaccatcatggatttcatcctactactgtttgcaagatccctagtgggtgtagtctgaaaatttttaacaaccaagaatttgctcagttattggcacagtctgtgaaccatggatttgagacagtctatgagcttacaaaaatgtgtactatacgtatgagctttgtgaaggtaagtgagctccgactcctccatttagggcctaacatacttttgctgtgctttttttttttttttttggcgatatatgaatctatatcctcttgataacatattatcatattagctgacttattatctaggcatttttaaactttaacaaaaatttcaattattaggaaaatatcattggaacataggagtacttgtattaaatatcaatagcagtaggttttactagccttttccttattcagatagcaccgctttagctattgtattaccagtagaatatgttatgttatatatttaacatataatttaaatacatggttgttttacgagatcagttgagtaagcatatcttccttccttttcattctttgttttttgtacttttatgatggtaatgcttgtttttgtttcaacagtaagcaagtgatctttttgtaaaaattaaagttcatcacattggaaattgtgtttggtcaggttttttttagtggtttcagtaagcttcatgattttcttacaattcagaagttaataaggcccttgcccaagataaatagatgccttagctcaaagattgcattgtaaggtttgatgagggaagaggttaaagacattgctcataataattgatctttttgctgtctcatgttctgcctctgagaaataaaaatttttaagatgccattgaaatcttaaaaaccttaaatgtctgattagatttctgagtcagtgacttttctagtaactgacctgtctctgaattctcaaaaataaatttcattctctcgtactttgagaaacagaactaattatatgtttgagtgaggcaattatcttttatgtcttctcttcagaagctcaccaaacttgttgttaaacctgttttgtaatgtatttattactgaggataattttggagccttacttgttaatcatcccttagatcaaagatatcttttcctgaatatagttacttttcctacttatttaaagcatcttagattttcagtgtgttcccttagtgtttgtttttgtgtgtttgtttgtttgtttgcttgtttgctttttgcagtatacttcaacagttatttgtagttgagtctggtaccttgttagtattaagaaaatttttttaccctttaaagaggttaacctatatgttatgtacatatgggactacaaagaactatcttattcattgttaacatgtgctgtttaatttttgacttagcatttggctcaaatgatttttaaaataagaacagtgacctgccagaagtgtttttgtttattgttttaattggtatggaggaaagaacagctcttgagagtcgagatgcggtttccagttttttctgccattttaactgtgtgattaaggcacagatttcttctctggttctcaggtttatcgtctttgaaatgggggtggatggagttgagaactgtggtaattattactgaggtccctcagtgagtctgttattgaaggaccactctaagagaatttattactttaatgttccaattagctttctgctcaaactcatttcttattgtttacccaatcaattttaattattttacttttgtagagttttaataatttacttttacacaagtaaaaacaacctttacactaataaaaggtatttataatgcaaagttatgcattcaaaatttattagatttcattcattcagcagatattttagcactatttcagagaagtaatacaaagatgaaaaagcacctaaagtctcttatcatcaagatccttatgccctagtatatctttaattataatctgataagcactagaatggagagttatacaagatataatgaacttagcctggaagttggatttggagagctgaaggtaaatattatttaaaaatcctgctgaatgttaaagaaaagttgtttatcatatgttagcaacaaaaaatttgcacactgtttttacaaaactgttctttattataaggactgcatactttgtcctctcccattcaacattttaaagaaattagaacattttactaacaatagccaatcttgtgctgtttttaaaatgatcatttttggatattaacataaaacacattttataaattatttgtactttaaattctatgtctgaaaattccaagtcagctcagctgaacacatatttatagagcttctgctttctgtcattatgctgtatattggaggtaaagataaattcctgccttcaaagatcttgctatctgatggaggaaacctgcacataagcctgtaaattaattttaggagtttgtttatatttacaaatgcatgagtgtacatacatctatgtagatatatatatatctacatagatgtagttcatacaagttctgatgttcagatatattttcttttttcttcttttttttcttttttcttaagacagtctcgctctgtcgcccaggctggagtgcaatggtgtgatctcggctcactgcaacctctgcctcccagcttcaagcaattctcctgcctcagcctcccaagcatgctgggattacaggcgtgtggccaccgcacccagctaatttctatatttttagtagagacagagttttgccatgttgtccaggctgatctcaaactcctgaccccaagtgatcacctgcctgagacagagtctctctctgtcaccgacgccagagtgcagtggcgtgatcttgactcacaacaacttccgcctcctggattcaagtgattctcatgcctgagcctcccaagtagcagggattacagggatacaccaccacacctcgttttagtagagacggggtttcaccattttggccaggctggtttcgaactcccgacctcaggtgatctgtccatctcggcctcccaaagtgctgggattacaggtgtgagccaccgcgcctggccccagatgtatttcttaaaactacgggagtagatagatagcagaaataaatagaacccaaccttctctgatattcctcatgaaacagtgattaaaggattaatcagaacttcacattcattgtccaccctcaccaatgagtttttgatctttgcagtagcagttacttttctctttttcatagtgactttattctatggaactgtattgtcttaatgcactaattctgccaagctaccttcttgtacaaatgaatgatagaatgtattgattcatggcaatggctaggtgtcaataatagctttttggatacttgaatgtactcctgcccgttttgctcagagattgaaagatcaagagctgtgtgttgatagggggaccttcagtggctgaatagggaagaaattgaatgtcattctgtctagcatagcttttttgttttattttcttgatgataaaatgagaatttaataatagctattacattactatcagtaatgggcaattaaaagttttaaagtgtctttattaagataactttataatgtattttaaaaccttcattcctcaagaccagcaattcttattggaatccatggatggaccctggggagctaacatccatcccttgaaattgcctgcgaaattatgcgtgcgtttgtgcatgtgtgtttttttctccccaggggcgggggggtcagggaggaaagatgcatagctttaatcagagtctttggttatgtgaactcttcttacttaataagtttaaccactgagttaaacaagttaaatgacctccagtatgtttttcctagggctggggagcagaataccaccgccaggatgttactagcaccccctgctggattgagatacatctgcacggccccctccagtggctggataaagttcttactcaaatgggttcacctcataatcctatttcatctgtatcttaaatggccccaggcatctgcctctggaaaactattgagccttgcatgtacttgaaggatggatgagtcagacacgattgagaactgacaaaggagccttgataatacttgacctctgtgaccaactgttggattcagaaatttaaacaaaaaaaaaaaaaaacacacacaccttggtaacatactgttgatatcaagaacctgtttagtttacattgtaacattctattgtaaaatcaactaaaattcagacttttagcaggactttgtgtacagttaaaggagagatggccaagccagggacaaattgtctattagaaaacggtcctaagagattctttggtgtttggcactttaaggtcatcgttgggcagaagtttagcattaatagttgttctgaaacgtgttttatcaggtttagagcccatgttgagtcttcttttcatgggttttcataatattttaaaactatttgtttagcgatggttttgttcgtttaagtaaaggttaatcttgatgatatacataataatctttctaaaattgtatgctgaccatacttgctgtcagaataatgctaggcatatgctttttgctaaatatgtatgtacagagtatttggaagttaagaattgattagactagtgaatttaggagtatttgaggtgggtggggggaagagggaaatgacaactgcaaatgtagactatactgtaaaaattcagtttgttgctttaaagaaacaaac

SEQ ID NO: 12 - DNA, 57852 bp, Homo sapiens
gtgtgctgagagggcaagcaataaaacaagtcataccaaaaggccacattggtctctcctaagccccaatcccactccactcctgtggccagtagtccaaacagaaaataactggagaagacgaggaggtcaaggatcaggaaactaaacgttatgtgaattcaccagcaagatgtacagaacgcttgcgtttacattgtttttatggaactagcagaataaaactgatctattttaaaaatgaaaaaaaaaaaaaaacaaaagaaagaaaacacagttgccactacttgagaggtggaaggaggagcagtgtcccagggcaaagttgggtttccttaagtaaaaaggtgaagggaacctgaagggaaattctgagaagaggttgagcttacagggaatatcatttgcataaataaatacatggtgtggtagactctaaagaggccccatatgattcccacctcctggtgttcaagcttttgtgtgtttccttccccttcaatgtaggtggcgcctgtgatttgcttctggccagcaatgtatggcaaaggtgacagagtatgagtgatactgtgtatgtgatgatgttacataagattgaaaccagtgtcttgctgagactcttcccgttgctggcttcgaagaggcaagctgccatattgttagcttccctatggagagcaccacatggcaaggaacagagggggtctccagccaacagcctgcaaaggactaaggccctcagtcctgtagcctgcaaggaactgaatggtgccaacaaccacatgaacttggaagcagatcctttgttccagcctcactttgtagaggacccagctaagccatgcctggaatcctgactcagagaatctgtaagatcataaatgtttgttgttttaggcttctatatttgtggtgagattgttatacagcaataggtaactaatacagacggaatagaagaagtttagttataacaatgtctcaatttcttaaaaacttcttctgaggtatattacctaagattcacatattgatctgttaccaaatcatgttttgtaatctatcagctgacagatcttccttcagttttgttgacagaaaagatttgaaaactatctgacttgaaaaataatttaatatccattcactaaggtcatttactttctcagcatagataccgatttttgaattgtcccttttggattgctggggaggttctgcattgatcccatgcaccttagtagtgggtgagaattttgactttcttctgtaaggtgggaggacagttttgaaaggggatgctgtgtcctcagctcctttctcaagctgggcaagtttagaaaatagaatatatagcaatggaagatgtggaaatgaattcccttaaaactggtctccataaaccccaggggtaagagaacaccagtttggagctttaggggctttctggtcaaagagggaatggcccaggcggtgatgtggaggatagaatgaagcactgagtatgagtggcgaaggcgtacggtgggtgtagagattttctgggcgacgtgacctaagaaatgactttagaactggctaatcattggttttggagggactaaaagtagttcctggttggtgaaaataaatcattaatgcgttttaaatgaaaaagaaatgcatgcgtcttgtaaaaaatgtgaaataaaagaggcataaagtcaaaagcagagcctatgccttcccccaccaaacaaacaggtaacctagttaacaggtgtgtcgtaggattcgaagttcgcctccagctccgagagtgcgcctacatctcttccaacaaaatccactcacacttgcaacgcctggcaaggctcttcaatatgtgattccttgactgtcctgtgcgtctctcgagtgtaaacacctctggggctcgtgattcggggctgccagaaagagaaggaaggtgccgccagcgtctgtttcttcccgaagtgaactcctacaacctagccaccttctccccagagctgtcgactggctgttgaaggccaatttttgtgcctacgcaggtcctcaacacagaacaaaacaaaaaaacaacaaaggccgggctaatagctatttataaacacttactggacgcccactctacgccgagctctcccgcgctccttggatacttttttgcaacgagatgccaatttccccggcgaccactccctcaaacaggccttcgcctccgcccgcgctgaggcccaggcccaggtccagattcagagccgcccgccggctggcgctgccctgtaggcgcctgcgcagagcgaccctccccgtcactcggagcgggaggcgggggcagccgggagaaaggaaagctgcgggggaaaagggccaaaccctgaaattacccggatgtggtccccgcgcgcgcatgctcagtggcttctcgacaagttggcagcaacaacacggccctggtcgtcgtcgccgctgcggtaacggagcggtttgggtggcggagcctgcgttcgcgccttcccgctctcctcgggaggcccttcctgctctcccctaggctccgcggccgcccagggggtgggagcgggtgaggggagccaggcgcccagcgagagaggccccccgccgcagggcggcccgggagctcgaggcggtccggcccgcgcgggcagcggcgcggcgctgaggaggggcggcctggccgggacgcctcggggcgggggccgaggagctctccgggccgccggggaaagctacgggcccggtgcgtccgcggaccagcagcgcgggagagcggactcccctcgccaccgcccgagcccaggtaaccgcgccatgtcccctccccttcccccggccgggcccgcgcaccccgcctgtggcttccccgccccggggcgggctcccgacgacggcggcggcggcggcggcggctgggagcgcgcggaatcctctgggagggcgaccgcggcggcctgacgagccgggccgggcgggccggctgaatgccgggcggcggtgcctcgcgtccctcgggcccccagctccgcttgcagctcgtgggagaatcaagttaaactcggacgggactcctgccgcggccgccgctcctctttgttgttctcagtagtttcacggtcgccccggctgagcgcgttgggtcggctggaatgtgttgccttagggtctaagtgaaagttgtaaattgtttgtctaaatttattttctccagccaatttctgttttgtctttgtcccctactttctcttcctagtcttgtcatgccagtttacgcttctggctttgatatgtttactttttgagtactgagagtgacagcggtatgcaggacacattcttagcacctaactgaacccctccttgcccccaataaaacatgcttcctaataaaagacacagctgatcttactgttagcactgcatgtactgacagtgaaattggtgtagggtggagggcggtggctccatcacttgtcccaaactgctgttaggatttctcaaactagattttcaaagacacaagtgtgtttagttaacctgaaaggtttatttgctggtgcagaggctttaaaaagccctgttgaagattgatagctgtttcccttcaaaaacctaagtacgtttgtttttatttaaaaaaacacatttatttcccaattagtttcttaatgcatttagtttttgcaccgtagtttaaggtggaattgccagttatttaggaataataaacacaacaggataatagcggaattaccctgaattgactttctgcaaacatataatcttagctaatttttgttagtaacctttgacttttgccagaattagcatccttctagtcttagtagcagcttggttactcgggtgttttaagaagtaggttcactcctttttgctggcaaaaaccatttagtatcaaaaaaaaaaaaatgcgtaatttcgtaattagatttagaacaaggcatttgaataatttttatggtggatttcataaattacttttgccataccctgcagagactagataatatatatttcagttgaaatctaggaagttctaaaatgtaacttttttttaatgctaaggacttactctctctatattggaaagttctgatatgattagtacataatattccaaactgtaaaatgattaacatttaaaaatacggtttttaaaattagtgtttcttccataatgctgtcatgattttgtttacttaaatgggtttgttacagaacaaatgtaatagagatggaccaagcatttgtaattcggagtagctttaggtctaaagacgatggtgaattatgtaggtttaagttgttggaattaaaactaaaagcttcttttgataaaagtcgttataacattttgtgactctattaatagaagtggctttttctttgctttccaggtttttgggcgagttttaaagaagtattgcatcttcgttttttttatttttgaagtgggagtgtatgtttctgtttaggtcactgccttcattgtaaatcttgagtttagaaaaaaccaaactgcaaatctgtttttcagacttaatgaaaatttgtgccgagaaagtcactttgaaatattttggaataagttttacatgaatgattgatcttttatgatagctttgctgtttgaagcaattctccctctactaggaagcagcaaatcttacttttaaaaacctctgcttcactttcttaagctacattttagtcgagcgattgtgtgtgaattctttttctgtattccccttcagtttttctttctccccgcaaattaaggagcgagaattaacctaatttatgctgcccagtcacactccagctctcccacttggaagcagtttttttctgattgagccagtgttatagtaacatcattagacactattctaattgaggtgtgagttactgaggcctctgctagggaggttaaccctacagaatctgtagggttcattatatttaaactgcatatttcggcttgtctaaatttttgcctattttggtgaaaacatgttgttttgtcgatgtttaaacttagttcattttgtccctctctagttcatgactaaccatttttttcatttttaatccagcgatttttttagagtggttctttaagcatcttgtattagccatttcaatggtcattatatatgtttggatttctcttattttgttgaactagaagactgtgtggttacgccccaaaatttttttttgtcttaaagccatgatgaatggggtgactctgaggtgaccattaatcgcgtataaaagtaacctgactaaaatgttttcattgttttctacagttaaaggacttacaccagcataacacagcatttttttttttttttttttttgagatggaggctcgctctgttgtccaggctggagtgcagaggcgcgatctccactcactgcaaaccccgccttccgggttcaagcgattctcctgcgtcagcctcctgagtagctgggattacaggcatgtgccaccacgcttggctaatttttgtgtttttagtagagacgaggtttcgccatgttggccagactggtcttgaacaactgacctcaggtgatccgcccgccttggcctcccaaagtgctgggattacaggcgtgagccactgcgcctgtcctataacagcatttaatacagttttgtaaaattatcacattttgggctttttgttcaacagttgatgaagtctcaattgttttaaaatgagaaattcaaacagttcacaaatatatctagatatattcatttgagctacttgtagaatgatgctgtttgcatatatcaagcatatgcttgatcataagtcagatttagaatttttggattttgttttctctttctaaaatgtgtaattttggtaatgggaaatttgactgaattccagtttctcaggaacaaggtattttaggttgtgtcaccttaacactattacctggtgtaattggcatccgggaacatttgtttttaactatgagagtgaatgaaaactagggtagtgcttacatatgtaaaactaagatggtaggtagtcggattcttacaatttataaggttctcataatctaagccttgatgagttgctactgcaaattatattatagatcagataagtaccaaagaccagttgtaaagagggtctgttaacattttaatcagtttaaaattggcggtaacagtaaagaccgttcagcccaaagactgtatttcattatttatattccaaatgagaattttttgcagtttggaaaacttgtaaatgtgttgaattcatctttttattgcttttttactcccaatgtttagggcaacggtcttttcttctctcctgtctccctccctccctccctttctccctttttcttctttttcttctttttctttttttttttctgagacggagtttcgctcttgtcacccaggctagagtgcaatggtacgatttcggctcactgcaacctccacttgctgggttcaagcgattcccctgcctcagcctcccgagtagctgagattacaggcgtgcgccaccatgccaagctaatttttttgtattattagtagaggacggggtttcaccattttgggcaaggctagtcttgaactcctgacctcaggtgatccacccgcctcagcctcccaaggtgctgggattataggcatgagccaccgcgcccagcctttttttcctttttctttccatcttgctcagtgccccagcctggagtacagtgctgcaatcatagctcactgcagcctctaccacccaggctcaagcaatcccacttcagctgctgcggtagctgggactacaggcacacaccatcacacctgtctaattttttgaaaaatttttgtagagatgggggtctctctctgttgcccaggctggtcttgaactcttgggttcaagtgatcgtcccacctcgacctcccaaagtgctgggattaaaggcatgagccaccacgcctggcaagtagttttcaatcttggctgtacttttagatcccttgaggagctttacaaaatactgatacctgaattctagccccagaaattatgatttggttggtctagggtgcagccaggttagccctccgcagtgattgagtcattagggtcctctgactttttcttttgaactgtttcacttgtgttagctttacattctttaatacagtgttacacacatgtacagtgtagccatctcacacatctaacttaacgggtcttttgaaagtattgccacatttgctttgcttctgtgtctgtctctttcttttctctcccccttcctgtcacctattcctttctcctctgtttctttcttcactttcagtttatttgaactgtctggtagtaagttttaggaagctgtatttcccatgatgagaagttagtatatcatcactattttaaataggaagttgattttcttttaaagtatattctcaaatgcttacttgtactccttttggagactaattactttaagtccccaagttagcatctgaactccctgtgggcttggtctggtggctcacatctataatctcagcacttcaggaggctaaggcaagaggatcacttgagcccaggatttcaaggccagcctgggcaacaaagtgagacctcatctctaaaataaataaataaataaataaatataactcccaatgcaaattgtcttcttagggcgttaatctacttggtaaaccttacattttcaagcccccaattaactagtcacttaactggtttctgagaggcaggttgcattgggctttttctgtcagggcttaattaatacactgtgagacatttgctcagctaggccagctagctagtacttctgtagagatcatctagggcatgttcagctctccatttacatcacctgaagtagttcccaagtgctgggctatggagtagtttcatctctgtctctggaagagctatttaaaaaaataaaaatattttttcccatctgattgcaacacacatgctgcttcagaatgggaatggagtggaggaggcatgggaatctgtgttatttttaaaaagtgcctcttgattctaaaggttttgtttattttggtatgcttatccttactgctttatttatctattttttagagacaggttgcccaggatggagtgcagtaacatcatcatagccctctataaccttcaacttctgggttcaagagatcttgcctcagcctccagagtagctaggactacaggccggcaccaccacgcctggctgatttttttaaaactgttttgtagaaatgggggggcgggggtcttgctttgttgcccaggctagccaaatcttatttatgatttaaaactaggaatgctaccgaatatatatttttatagtaaggtattatttctgtatgttaatatggatgaatgtatgctactcaggtcttttcaagtcaaaatgtatttctaaatataagatgaattaaggatatttgtcagtgatattcactagtgaattctagagcatatgttatcagtagatgggcagtccttgtaaaaattgaataatctagtgaaaggatgaccggaaataatatttaatggggtaagctaagccaggaatcattgtacataaacacattaggtgtgtcttacatcataaatatgcctactaaaactagttgaaggaagaatgtgtatagatgctgaaataatgaaggggctggctaattgtaaggaaaaatgatacaacttctatataattagtctttttaatcagttgcatatactcatgatacttaatttgtaaagtaaagattgtagactagatcaatgctttgtaaaactaacagtacctcagacttccagagtgttttttaaaggtacagccccacccttgattctagttagtggagctggcctaacctgcgggggattttgatacatccccctttgaaggaataagctagatgacttgaaactctgcttcagttaaaagttttatgaaatgaggccgggtgcggtgactcacgcctgtaatctcagcactttgggaggccaaggggggtgcggattacctgaggtcaggagtttgagaccagcctgaccaacatggtgaaaccccgtctctactaaaaatacaaaaattcattgggcatggtggcacatgcctgtaatcccagctactcacatgcctgtaatcccagcttcttgggaggctgaggcaagagaattgcttgagcctgggagacagaggttgcagtgagctgagattgtgccactgcactccagcctagctgacagagcgagactgtctcaaaaaaacaaaaaaagttttataaaatgtatttttcagttatcagttattaaaattcagtttggtttccaccatcttttaaaacagtggttcccaaagtatggtccacagactcctggagatccctaggatccttatatttaaggggttcacaaaatcaaaattattttcataatgaaactgagacgttatttgccctttcactgtgaggacatttgtatgggtggtgaaggagcagtggtgggtaaactgctggcactttaaaatgactctaggcagttataccaaacatatgagtcctcattgtgttctttatagtcaaacacacataagcatttgaaaaaatgccggtttcacttaataatccccttgctgcagcagtaaaaaggtttaattttaaaaaaatctctaccttggagtatgtctttttaatagtgtgattaaatgggaagtatgcataaagcatttctgcacattgaagtacagtgttcttttctaggaaaagcacttgtgttattgagctgcaagctgaactagctgctttttagtgggacaccatttttatttttatttaacaggatgacagataagctcagatagctatttagatttgagtatttggcaggtaattccttggaaatgaataaagtgagctggccacttcgaggagaacatttatagccagtgctaaaatctgatgtttcaagtgaaaatcagatttttgggaaactcctgtcactatgacttgccagtttcttaatacttaaagacttttctgatgagatgggtggtgatattaaggaatgtgattaaaaaaaatatgttgggctgggcacgatgatgcacacccatatttctagcactgtgggaggcggaggtgggagaattgcttttggccaagagttcgagaccctgtttctacaataacatataaaaattaggtgtagtggcatgtagttctagctgctcaggagggtgaggtgagaagattgcttcagccagggagttcaaggctggattaagctaggatcgcaccactgcactcgggcctaggctacagagcgagactgtgggggggggggcagtatgaggaagtgtgtcaacactgggaagatctgtgtaactcattgaaccaatattttcccaaatgaccaattcatgttacaaaatcgtgcatgggtaggcgatccgttcaaagtacaacatagacaaatggatttttatatacaccagagccaaaaagttcactgatacagtgaattccacattgcaactaacctttcagaattgccacttgagttttggtgttgaataaaagatgaatatccattgttttctgagaaggctgttaaaatactcctctcttccaattagctgtccatgtgagacacgttttcttcatgtactttaaacaaaacaacatatcatagcagattgaatgcagaagcagatatgggaatccagctgtctcctattaagctaggcattaagagaaatttgtgaagatgtaaaacagtgttactctgattcctgactttgttttagaaaattctgtttttcataagatgtttatattaacgtaatgggtttattattttaaatgaattaataaagcaaataccaaaaattttagtagttttatttatttataatatgataaatatcaatgtatatagcccgcataaaagctatttggtgtctttaataatgaagagtataaataaaggtccaacttggccaacatgacgaaaccctttctctactaaacatacaaaaattagctgggcatggtggtacatgtctgtaatcccagctacttgggaggctgaggcacgagaatcacttgaacctgggaggcggaggttgcagagagctgagaacatgcctctgcagtccagcctgggcaacagactgagactatgtctcagaaaaagaatatgaataaagggatcctgagatcagagagtttgacagctgctgttttaaagtaactatttctatgcattatcgactaaattactgattgattgaattgtttttatggtttgtactatattgctgttatttctaaggacgttagtcattcagtttctgttcagttatcagggaacatgtaagagtcagacttaagtaaaaaggggaattcattggcttggtctggagatagagctgacctcagattgctatatccagggtttcaagcagcatcaccaggactcttgactttgctttctttctgtttctcaggtagtttgcaggctaactatccccagcttcaaggaagcatgaagagggccttcccccccccacccccccacccccccaccccccgtagttccatcggaagtgctagagctatgtcacttgcctgccttgcgttctttttcatcagaaacaacactgtggccagggggtggctctggttagtctgggaattgtcccacctggccagatggggagattctccttggaaaatcagactgctgttttacaaatggagaaatacatgctggtacacaaaaactgatgtccacctatagtactttgttatttcttcttttaacagcctttaatttattaatccaaaaagggtaatttttaaataagatcatttaaactgaaggtggcataccaaaatgacatttaagacacataggtaaacaagaagcatacatctcgatttgtcctttgtcattcatcttaaaagttaaaaaaaaactttttgttgcttttattgctgtataaatgtgctcttggaagttcgccaactgccctcagtttgaagaacctcaacttgctgtctaggatttagtctttagcttgtgctgcagacagttgcactaaccgtgaacacctttttttcctgttggtaaacctaagtttagagtttattcctagtaataacattgatatattaccaggcccagcttttttctcctcccctagttaaatttaagcacttttgcgccgggcatggtggctcatacctgtaatccagcactttgggaggccaaggcgggcagatcatgaggtcaggagatcgagaccatcctggccaacgtggtgaaacttgtctctgctaataatacaaaaattagctgggcatggtgatgcgcccctgtagtcccagctactggggaggctgaggcaggagaatcgcttgaacccaggaggcagaagtggcagtgagccaagatggcaccactgcactccagcctgggccacagtgaaactctgtctcaaaaaaaaaaaaaaattttaagcacttttctcaaatattcccatagtaagtagtttattgatcactgatcaaaacacttacaacttctagaaaatacatgtttgacacatataatacagttaattcaaaagtaaactaacatctgagaaaaaatgtcaacactccttacctaaaatacatgaatttacatgagaacctctctctggccagtattcagcctgtttaattttagagagtatcttaattagtttggttatttggctttctcgtccatttattagtatacctatggtcaacgtcaggtgacagcttacaattaatagcaaggctagaggaaaaacaacaggcagataacaagaatcagctgtctcttcttgctaactctttacctctcataactcttgactgcatctaatacctgtatatgttagtgcctttcagataggcctaacttctcatctcttcaaactcaagatatctaaagctgaatttgttacatacctgcttttaaattttttaatcattgagttatctagaaatgggtcgtcttttatttgtcccccctttttcacccttcatatttcagttggttaaagactccagtcttttctacctagaaatagctcactgatttccccctcccctccttggcccattgcccatgccccagtctaggatcttaccgcttttctggtaattgtttcctaactggttttctatttccttttccaaagctgttctccaggctctcactgaagttttctaatacaaatctaatgctgttttttctcctctttctaccatgaacctactctagacaaagctcttatccgtctctgcttttcctcatcattttccttcagcctggcaaattcttattcgtatgtggtaatccattaatactattctaccaatattctgatggctgtcccctggcacatggtagtattgtgcttctttgtctccctcatccctaccttgaaattaggcatggcccagagtttcttgcattggcactgttgacattttaggctggataatttattttgcgtgttgtccagtgcattgcagggtatttagcagcaaccatggcctttagccaccagatgcccagtagtatccagttgtgaccatatattgcctccagatgttgccaagtgtcccctgagggacaaagttgcccctggttgagaactcctggcatggccttatgactttggccagtcaaacatgagcagaagtggtagcctttaaaagaagatatatgagctgtcctatcccttctcctgccatttaaggacatatgtagaaatggagcctttgtcagtctaatttctgagcgatgacagcagtgcccccagttgatctgtgatgaatgtgtattatatcctaagcagaaaataagcttttgttttaagctactgatcttttgggggttggttgtcactgcagcatagactagccaatcctgactgatacgttgtgccaagacctaggttacctatgaactttccatgctccctcatttatagtcccaaatcactttatacctacttcttttagcatttattacttatgtaataatatgtttgggtcttccagattagtagttctcagtggagtaagtactgctctttaagggatgttgtagaaatttgtggatgggtttggtggattggtggccagggatgccatcctgcaatgtgagagacagcgaataattatcttgcatcccacaagactttcagatgccccagaaattcatgtaggaggaaaatataattagcccagaacctaactctataatatatattcactttgccaggagttaaatttcttttaattcatttttttcttgcctgcctgcctccctccctccttccctccctccctccctccctccctccctctctccctctctctttctctctgttttctttctttttccttcctccctccctgcctccctcccttacttcaggctctgttacccaggctggagtgcagtggcgtgatcttggctcactgcaacctctgcctcccaggctcaagccgtcctcccacctcagccttctgagtagctgggactataggcatgtgccaccatgccccactaattttttgtattttttgtagagaggaggtctcactttgttgccaggctggtcctggcaaccgtgcctttgttgccaggctggtcctgagcttaagtgatccaaccatgtcggcctcttaaagtgctgggattacaggcatgagccactgtacccggacttggttgttttgttttttatttttgagaccaaatcttactctgtcacttgggctggagtgcagtggctcagtcatagctcaccgtagccttggtctcctgggctcaagcagtcctcctgccccagcctcttgttaattcattttcttagttcaagttgtttaagagttcaccatttgggaaaatccatgttactgactgcagtgccattgtgctatttgagttgccagtataacacgtttgtcttggaaggtctgaatttgtagctgtcacatttgtaatgattctgtatataagtgctagcatctaacttctttattatacattctaacttagttggcatgcctgagtatttataggtggaagtacacattatatattaagcttttcctcctttttgttatagttagggcattgttaaattttcaaaatatgtttaagtagtttagaattttgtttcagtaaagctaaggtggtgatataaattatttgttggaaaaaaaatgggatgttggtctgagagagtccagacccactttcttactatgggcttcctgtttttgtatctgtagtgctttgtatatacagtgtttgttgaattggtcaatttatgtttcccacatttcttttatgtacgttgttgcatctaattaccacaataaatttgtgaagttgtcagggcaggtgtttccattttatagatgagagaattgagagagatgttaacattcagtcatgcggctagacctttaattagaatatataattttatttatatcgatattatgctcttgcctaccatacttccataatctagaaccatttaatgtaggaatacatctctttattcctgctagtattattttttatatgcataacttttaattatgtttcaggcacttgtggtcataggaatacaataaagagagagatgagaaagctgtttgtttaagaaagcgaggtcattatcatttgtattcaaagcaacttggtattaaaacaaactttgagataccgttaaggccccagcatagcataaattttagaaatgatgacatttgatggtgagattgtggtgaaatagttaacacttaaacattttaattgcattgtagattcatacacatcttttggaatataatatcagaaaatgacttcaaaagtgtctgcactcttctaatttgttgtaagacaattccacagaataaaaagctatggtcagtccagaaacacttgcctggtatatgtcaggaactgtgcatggtgctgggaatttctaaaatgagagtgttgttgctgttttcttggatttctaatttgtggcaacaatgtgagacagatatgtaatcaaataactaatgtgttacattgtaatttacacatgtaatttacaattaaattgtaatcgtaattgttaaattgtaatttaacgtatctttccttttccctctttcccgattcctttcctttctactgagtctcactctgttgcccaggctggggtgcagtggcacaatcataactcacagcagccttcaactcctgagctcaagcagtcctcctgcctcagcctcctgaggagctgggactacaagcccacactaccatgcctggcgaacctcctacatttttttagacagattttaatagaaaatgcagaaaaatgcgtaatgcattttaggaaaaatcttcttgtaaaactattattatttttttgagatagggtctcactgtgtcacccaggctgtagtgcagtggcacaatcacagctcaccaaggccttgacctcccaaggctcaggtgatcttccagtctcagctccccgcgtagctaggacaacaggcgtgtgccaccacacccagttaatttttttattttgagtaaagatcaggttttgccgtgttgcccaggctggtctcaaactcctgggctcaagcgatccacctgcgtcggcctcccaaagtgctgggattacaggtgtgagccaccgtgcctggccacaattaagcatgttaatatttcaacagtagcttttttactgaacactatgtatcagacacgttatgcagaatttttcctttgagcttctgtataccctccttttaatccagattcagagtaacttcattttctgactactatgaaaactggaattctaattcaaatctcttgactccaaaatctcccatgcaggttatctttggttatttggaaagtgtaccttcagcatgtgtattaatgtgggcaagtgctctaagacatatgaaaaactgcttctctgcatggggtttatgagttgagacagacatttatgtgaaagagataacaacagagggaggagcaagtcttcaatatcaggtgattgatgtacattctgaagaggctcaaaactacaacagtggcagggagaatgggaggagagatagaaaagactgaggtaaagaatcttgtaactgtaacggaatgtagggatagtgaaggaaagaggcacgtcagagatcttttgcaaagcttcccaaggctaggtaattgagtggaattgatactttaacaaaggtcttcagaagaggaagagattttggtagaatgatgagttttattaatcttgtgggaggatactttaaggattcaagtatgcagtaaaagaaaatgaaagcaagataagtctggaatgcaacttcagtgaacaaataaaatacaaacaagcacacaaagtacaggctccagtcctgctttatcttctttattcttaagctaatggccttttcctattctctgtggggtcttgggatcagataagttagttttctacctgttgaatggattctttattaatcttcagtttttgttattttaatttttttgaaaataatttaccctgctgcttttacaggtaaaatcttttgaggaatttagtgatctctttaaagaacagctgtattgagatataatttccataccataaaattcactatttgaaagtgtacaattcagtggtttttactatagtcagagttgtgcaaccatcaccattatcaatttttaggactttttcattataacaaagaaacaccatacccattagcagtcattcctcattccccttcctcccaggccctggcaaccactgatttactttctgtctctgtggatttgcctattctgtatatttcatataaatgggattatataatgtgtgaccttttgtcactgacttctttcacttagcatgtgttttcgaggcttatccatgttataatttgttagtactttattcttttttatggttgaataatatttcgttgtatggaattttatctatgcattcatcagttgatggacatttgagttgtatccattatgaacaacgctgctatgaacattcatgtacaggtttgtgtggacatgggttttcatttccctcaagtagaagtgtgaagagtagaattgctgggtcatatttactctgtttaacattttgtattaataccagactgttttccaaagtacctgtgccattttgtaatcccagcaccaaggagtgagggtccaatttctcggcttcttcaatacttactattgtctttttgatatatccatctcagtaggtatgaagtagcagctcattgtggttttgattttcatttccataatgtctaatgtcgagcatctttcatgtgcttattggccatcgtctttggagaagtgtcctttagaatccttttgttcatttctaaattggggtttttttttttttttaattggtctcttttaacaaaggtgagtgttaactgctaggtagaatttcataccaggcgatggtaaatttttcataaatattagtaatagacttttaggtttaactagtgctgatcctcataagtaatcctttaaaaaagtgctggtaagattttcctttagggtgactagtaaagtcagtaagacttgattgagcatgccactatcataatgagaagacctaactttaatatttttggaatgtcaaaaacagtgacattttaattaagtaattttatttttaaaaattatttttaatggctaatattttgtaagaattttaagtaattttcaactctgagcatcaaattttaattatgtgcattgaatctctgacttaaccagagcaatttcatcttttcccaagtagtcagatctacttcgtaaaatgtgttctgatgtgtgtcttttttttttttcttttttaggttatcctgaatacatgtctaacaattttccttgcaacgttagctgttgtttttcactgtttccaaaggatcaaaattgcttcagaaattggagacatatttgatttaaaaggaaaaacttgaacaaatggacaatatgtctattacgaatacaccaacaagtaatgatgcctgtctgagcattgtgcatagtttgatgtgccatagacaaggtggagagagtgaaacatttgcaaaaagagcaattgaaagtttggtaaagaagctgaaggagaaaaaagatgaattggattctttaataacagctataactacaaatggagctcatcctagtaaatgtgttaccatacagagaacattggatgggaggcttcaggttagtcttataagagtttttctataccctctatggtggcagatttaaaaacttgctacgtttcctttcaagctactacagggtaatttaatttgtgctccatctcttcagatactgtgcatcctgtacaaatatgcattatgggaatttctggaagaatatgcaaaagataaaatcttaaagttttttaatgttctactcagaaaaatgttcaatggagaaaatttggaaaataaaaataaaaagcagaaaacccacacttcgcaagaactacctttagcactttggtattcatttttgtagcctgttgttttcttttttttttttttcctagacggagtcttgctctgtcacccaggctggagtacagtggcgtgatcttggcccactgcaacctccacctcttgggttcaagcaatcctcctgcctcagcctcctaagtagctgggactacaggcaagtgcaaccatgcctggctaatttttgtatttttagtagagatggggtttcaccatgttggtcaggctggtcttgaaccgctgacctcaggtgatccacccgcctcagccttccagaattctggcattacaggcgtgagccactgtgcccagtcgtgttgttttcttttttgatattgtatgtacatttaaacaaccggattacacttagtccttttataatttagaaatctgatatgtttcactgttagcaaatgtttcattggtcacatttttcaggtagaacttcataatacagctcccttgcttaaataaatcttacagaaattttgtcgtagattttaaagttttatttcaagactttacacatagtttctgcaacacagtctttttgcatatttatttattttattttatttttttgagacatggtcttacttttgcccaagctggagtgcagtggtgcaaaacatggctcactgcagccttgacctactgggcttatgcagttctcctgccttagcctcctgagtagctaggactacaggcacataccaccatgcctgggtaattttttattatttgtggagacaagggtcttgccatgttgtccaggctggtcttgaactcctgggctcaagcgatcctcctgccttggcctcccaaagtgataggattacaggtgtgagccaccatgcccagtcactttttacatttttaaaacctgagcacaggccttgaaattataccaaggtttaaattctaggtctgatgtatgacatggccaagttagttattgtgaattttagttttcttatttatgaaatggggattgtaatactgagttggtaggattgtgaggattaaatcagaatatataaaagtgtcttgcataatgtgacacatgaataaatggtcgtttatttttctaggtggctggtcggaaaggatttcctcatgtgatctatgcccgtctctggaggtggcctgatcttcacaaaaatgaactaaaacatgttaaatattgtcagtatgcgtttgacttaaaatgtgatagtgtctgtgtgaatccatatcactacgaacgagttgtatcacctggaattggtaagtagactttgctttcatcctaagaaacataaagggaaaaggatctcaatagtgtttcaatttttgtaagttaaattataaatttggaagatagcccgcgactttaaataaggttaaagaatcagacatttttaatatacgtatttaaatttgaatttaggaacaaacttatattttgactgctaaaaccgagtattgtagttgatattttgcccctttagaacattgtttttgagaaataagatggaaagcattataaatttgaatacttagttatgtattgttagatagcgtttatgctacttctgaattgaaatggttcatgaacttttgtaatctttggtttaaatttacattctctgtttttaaatggaaaatactttcattgtaatgattaatgtttcatttgttttcccctttaaacaattaagatctctcaggattaacactgcagagtaatggtaggtaatctgtttcttactactttctctttgttttgtcctatcctctctgtttttttgttgacctagaattagtttgtgtgagcggcaggcagtaacattaacaagaaaataacttactgctttggaaatgtagattttgaggttaggggcatttaaaactggatttaaaactggatttaaattggctattgctctttgtatttgaactgcaatttatgaactaaagtactgtaaaaaaatatgatagaggaatgcaccaaaaacaaatataaagaatattttttgagttaagacctatttttgaagaaaatctcacagagccagtttaaatggatgttaaatacccagaatatttggtaatttggaatcacatataacatatcctttaaaaataccagtattctaattttccttcatttcagcctaacatttttatgaatgataatgttgagaatggtttaaaattgcactcttttgtattttttcagtcttgttacattttgagtaaataaatcaaggctactttaaagcatatgcccatcacagcttacctaattgtatttttaaaaagaaaaagtgttttaaggtgagaaaatgaaatgtgaatgggggtgtttttgttttttattgtaatatttgagaatggagttttattaaatctttagctctgttacttagaacttaataaactaaaatttctgtaagaactaattaatttgcagagaaactcttataaagaaccactgtcagccaggcacggtggttcacacctgtaatcccagtactttgggaggcttaagcgggtggatcacctgaggtcaggagtttgacaccagcctggccaacatggtgaaaccctgtctttactaaaaatataaaaaattagccaggcatggtggcgggtgcctgtaatcccagctactcaggaggctgaggcaggagaatcgcttgaacccgggaggtggaggttgcagtgagctgagatcacgccattgcactccagcctgggcaacgagcgaaactgtctcaaaaaaaaaaaaagtggggggaggctgggcacggtggctcactcctgtaatcgcagcactttgggaggccgaggagggcggatcacgaggtcaggagatcgagaccatcctggctaacacagtgaaaccccgtctctactaaaaacatacaaaattagccggacgtggtggtgggtgcctgtagtcccagctacttgggaagctgaggcaggagaatggtgtgaacccgggaggcagaggttgcagtgagccgagatagtggcactgcactccagcctggttgacaaagcgagactctgtctcaaaaaaaaaaaaaaaaggaaccactgtcatcttagaaaggtgtgctcttgttctggagggcagttagtagtagtttagcaccttttttgtttgtagaattttagaggtgggtcagaaatactaggtgaccttaaccaaaatttaggaagagtatgcaattctacttgtttttttttttccacctttctcccatatcactggtaatggaggaagactcactgccttgtggtgcttgttagtgattagtaggtttctgacaagtgtgggtttattattaggagctgttgtggtggtctgggaagggttgctttaagattggtgaaaactctgcttctttgctacgcagacattgatattgtatcacttctttttttttttgaaagtaaacacgtttcatatcttcaccattttccatccatgtttttggagaaaacgtttgtctcagtgggtattaaaggttgggagactgcaatgataagtgtgtctgaatctctctatggggctgtttgtgagggggttcaaattctgagtgctcatcacacacctcccctattctaaaattattgatgcactgttattgatgggattgtacgggttgatagcctttctatagtgactgtagggctgtattcagccttgtagatccccctagtggtggttttgtaaaggctgtcttcagtgtcttatttcctcagaaaacaactggtatttctcacagctccttctagatttggacaaaggaatgatacaagagcaggtaactaaaagttaagaaaatgggacagttccttcatttttgagttaaagtcttgtggtaatcatttccagcctatcttttacctttcatgaaactttctatgaccacgttgacctgtgtattcattttaacaagtatttaataagcatgtattgcctggtactgtgttaggttccagggatgcttagataataaggtatgttttgtctactcaagtgagcttatactctagtggaggagagaaaaagtaaataagagagtgataataccatgagataggtgctgtgtcctggttgctggtgatgataaagaacacagacctaaggtgggcccagtggtttcagcttttttgtcacctatagagaatatattctttgaccctcttagaacattttttttttcttttttgagacggagtttcgctcttgttgcccaggctggagtacaatggtgcgatttcggctcactgcaacctccgcctcccgagttcaagcgattctcctgcctcagcctcctgagtagctgggattacaggtgcccgccaccatgcccagcatttttttttgtttgtatttttagtagagatggggtttcaccatgttggccggctggtctcgaactcctgacctcaggcgatccacccgtctcagcctcccaaagtgctgggattacaggcatgagccactgcacccagccctcttagaacattttataatcactatatatatgtataactactctaaaaatatggttaaataataatagctaacactgggtactcgtgtgtcaggtcagactgagctaaatgatttctgagtattgtgtcatcattctcatgatacttctacatgggaggtgggattatttatactttaacagatgaagggactgctacctggagaggtgaaggaacttgcccaagaataggcaactaggaggagccggagtaatgtgtgcttgctattagatatttaaacaatggaaaaatattacaaaagactgcaaactccatgacagcagggatatttgttttgtttatggatatatcccaagtactagaacagtacctggaacagaagtgctcaagaaatattttttcagtgaatgaatttgttgaatgctagcccataaagagaaatatttaacagtttggtatctgtttttctggactttaaaaaatatatactatatgtttttttaattttatttttttgaataggcaatacatggtccataaatcaaaatactataaaaaggtatacagtgaaaagaagtgctcccacccctgcccccattcccccctacctcaggtaatcactttttttagtttctggtgtttccttccagggtttctatatgcaaaaaatacatacctcctttcttacacaaaacgtatactatgcatactgttctggaccttggttttttacttacagtatatgattttttaaacatgcatatgatcatagtgtacaatagtgctttgtaacttgctttgattctcttggcaaaaatatattgcagacttctatccttgttgatacctttagttttacctgagaaacatttattatggattatctggggttaaagagatctgtagaccagtagaagtttcaaacttacatttgggaagtttagccagcatatttagggcaagaaagatttatgggtcataactgtttaaaagcagaatacagttggtacataaagatgttatgattgctgattaaactgaagagtcatctgaaaagcaaaagcagtgagtaccaagttgaccagttgtatcctcaaatcagctagcaaaaccagtaagttggtaaaaagatcccagtcattataacaacaaaaaaaacctaagatgtccaggaattaattagagatgtcaggatttatatgaagaaaatcattgaactttgttgaagggtgtaatataaggctgaataagtgtagacataccaattttgtgccccaaacaatttttttctttttattatttttataacttggccaatgttgatgagtggttgtgttcagttttttttattgatacataatttgttacgcatccttttgattatctttttgtttccataaaatttctaaagaggaactttggaatgggatttataggtcttcagaatatcatcttcatgacttttgatgcatgaacatacttcttaagaggtttttaagaggttgtacatagaaacttgcacaatggatgattattactgccttaaactagtctcaatttaataaaaagtacccatgtaacttaactgatatttacatgtagtagattttttttcaaaggttgacatagggaaagataagggaaatgatatgctggttcttaatgaaaaagggaatgtctttttgtggtctactaattgactgctttaagaagagaacctactgttagttcagtggattgttaagttctggagtagtgttagtttagaagcaataaaggattggttgctaaaggtaaaaagcaaaccttaaaacaataacctaaaaacaaatgggaaggttctgggcagagaattaacattgttaatgcagttcagtttcagttttctttttgtcatacagcagagctaactatttcctggttggttaatggaaagatgttatgctgtatcagctggaatctagctttgcttatgaaggtgtaatcacataggtgaaagatgttgattactgagttttctcacaccatatattaatcaaatactcttatttgggttgggtttctagagggaaatttcagtttgacttttcatttataatttttccgtttggttctaaacctataggggacattacattcagtacacttcatttttaaagaatatgttgcttaacaataattctagatcctgggattggatatctatcagatcccactcatatctccacagtgtgaaattaacaaaaagatatagttaaatactcagtctctatttagaccgaataattgtttttctcagctggacacattttccagccattcggtttttgcctgccttatgtatttaggtgattattcttctaggtttatcaagaaactgaggagtacctttttaggattgttgctggaggctgttgaaacatagactagcttcaaatttgagagtcagattgattgataaaatatatctcatgctgttaccgctgaataaatgacttttgctggtaaagtagtatgcttttaaaataatatgaaaaaattctgaattaaggttagtaatttacactgtaattgattttaggtgttattatattacttgctaataagatttttttttctgggaatagaagcttataaaaatttaaaatatgtttaattttctatatagctccatcaagtatgatggtgaaggatgaatatgtgcatgactttgagggacagccatcgttgtccactgaaggacattcaattcaaaccatccagcatccaccaagtaatcgtgcatcgacagagacatacagcaccccagctctgttagccccatctgagtctaatgctaccagcactgccaactttcccaacattcctgtggcttccacaagtgagttctagaatcagatgtagtcagcaagttgagttttcctaatcattgcttatttatgtgtagtcacttggggggaaactccaagtaagtaaacattaaaagtaactgtagtatctttcataggtaaacaggtattaaacaggtatgcacaatcacttggaatttaagtaatggctttgattataatattgatttaaattaatgatctgatttatactttactattacatgtagcagtaagtagcctcttaagctcccagatatattttggagaaatatttaaataattaacaagtagttttgatccaagatgtttatgaaggtctgtgttaatggaattgcaacctttcttttaatgcggtgttcttattttggtttttctgggacaatattaccttatagtagttgtctgattttctcactgtgcaaagggatcttgacaaatttgttatatattgctcaagatagacattaattaagtcaattttgatataagctaacttctatatctctttttaaaatatatgtgtaattaaaaaaaaaaagtgtttcagaaagatccttcttttctgccatgtcataggagggagaggggctgctaggttcaggtttttgggggcatgatcatatgacctggttctgttacttattttcacagtaaccaaaggtttgatagtttgctgcttggcaaatgaagtagcttttttttcattttttttttttcaattaatcatagagcattgtcttggcatgtgtatggtgttagttgcatgcagttgctaaaggaatttatgtaaacccacatcagaatagatttttgacagctctgggctaatactgtgttagttgctaccgaaagtaccattattgtatttgctttactatcagattagattcaacatagaaattttgatctttggaataaatgggggactgatttctgtaattgtgagttttcaagtgaagtataccagaatttcccctttaattcattacaccacttcaaagcaacatgtttttggtttgctatctaagagatgacagtctcactataggcagcatattctaaatgggtcatataggttaagcacttgagaacccagttccttaatcacttggtgcttctattatctgtctactttttatttaccaaattaggaatatggttgacaaacagtgggtagtgatagaaaataaaagaaggtacattatagccacttgaacgtagattagtgctagagcacagctacctacttctgtttatattatctggagattgaatttctgtgcctttgtcaatgcttactaaagtgacttcattttgactgtgttgtttcctgaggttgaatcctattcaaagattagaaaaagtgatagaaatgaaatgcagctaattttatcctggtatttattgggtagattttaataatcgaataccgtaaatactgtaagttttagaacttgtgtcaaaatgttcccttatgtggtggcatgcgcctgtagtcccagctgctccgggggctgaggcaggagaaatggcgtgaacccgggaggcggagcttgcagtgagcagagagcgagtcactgcactccagcctgggcgacacagcgagactccatctccaaaaaaaaaaaaaaaaaaaaaaaagagggttcccttaggtctcaaaaagtatattgatgaaaagaagttgaactaaaatagaagatttgaaaggctattttacgtgagctgatttagtcgtattgtttaactttattttacatacttagaattgtataagggaagtattcagtatggataactacagtgagtcactttacaatttatgttcttttgacacctgaatattttaagaatttccttttaaatacctgtaaattaaaataatttatcctgtgtagttaatgacaatttttgtaagttagctaagagtattgcctgtagaattgttaaaaatatgaacaaaaccataattaacctttaaagataacttgcagaatctgggggatgagtaggaagggaggttgctaaaatgtcatttttacagataaataatttggggagtattgaaatattctctttagcttttggttttgtaattcttagctttaaggaaatgtgatatgtaaagaaaagaaaaatattccttttctttgatactttgagcaatggtgacatgttactctcttccatctgattatactcccatttagaaaagaatgaggtgatgccagttataaataattataactttagtgctttccaaataggattaacagtcgagttaattaatgctctttaagaaaccaaatttccactttaaaaaaaaagccttaaaaatgtaggacagtaagcaatatcataggatggtttttgaatagaatacaagccaagagaagcttgattctcttggtatattacatacagagagggcaattaatttcttgtacatctgggaatatgatggtgttcttgaaaagaaatgattcttggtttataaaagctcttgaaaaaatttgaaagtagactgatagtttttttgtttgtttttaaccagtaaatggtatattgattggacagcagagctagatctttttaacttcctcatcttcactatcacatcctatttaaaataattttctgctctgcttttctctgtcaaaccctagcattctgccattactagtatcagtgctgatagtgattaatttttcagttttcaacattttcttgagcctggatttttggggtcctaatcagaaaggtccagagagagaggtggatggagtggccaggatgaactgacatacctctgaagaagttaatatgataggccagacgtacagtggtgttttgctggcatttgaaatatgtttgtgaagaaataagccactacaattagttagacattacctaaaatggaataattttgagcttcctcaagttaaagtttgcctttatagatgactgtaggttttttacctgataggccatgggtgagttacactttttgcccatctttatagttgtgcattatcagataaaattggtccttcatttagtatatgaaatcataagatgacatctatgaatgtaccatgttaatgtcttcttgttcctctaggtcagcctgccagtatactggggggcagccatagtgaaggactgttgcagatagcatcagggcctcagccaggacagcagcagaatggatttactggtcagccagctacttaccatcatagtatgtacatactttaaaaaatcttttaaatagttgagaaaaaagtaggcagcctttataaaagcaaattaacccatgtgggccttaatttttagacagcactaccacctggactggaagtaggactgcaccatacacacctaatttgcctcaccaccaaaacggccatcttcagcaccacccgcctatgccgccccatcccggacattactgtaagctcttgtttttgttgtaagggctattttttttttttttttggtagggctttgttttctgttttttaaaaatgtttttacatcttttattcatcctgtgattttgtttcattaaatagtgcttttcagtattttttgtaaacagtattatttttcatagttatcctacctttttattttagaggagtgatgtttgctaaatacatttatttctctgttgctaatgtttcattaacatcacattgatttccattcatttgtttgtttgctttgtatatgttcttagatctcatctgtgtcttgtatatccacgcataatggattgaaaccctttgagtgctaagttctcaaggtttccctcagcgtagtattcagtgtactttggataatgttgaatctatagataactctgtgctggcatgattgggaggaataccctacagataacatgtagtttcaggtagaataggagcattgttcatatggcttagtaaaatcgagagtataactcttatatacattaaatccctttcttctcattataatattaatagtaccaaagaaaacttagaaaatatagaaaagtataaataagaaaagcaaaattaccctgaatcctgctactcaaaaacagccacttctaatattttgttattttccttccagtcatataaacaggtatatgtaaattgacaggggctcctactctatgtgtattgtatatatcttgcttcttttcagttatgttactattttttccatttcttaagagaatgtaatttttaatggctgcctaggccgtcatagtgttgaagggtgctgggtttggacctttaacaggctgtgtgaccattgacaagttatttcacctcattaagcctcaagagtaataatagtagtatctacctcaaggggtgttcgtaagaagtaaacgtaataatttatgtgaggtgtttagcacagtgttttaacacattaccagttttcaattatgttagctatgattccattaaataaacatccttaattaacataagcacttgtttttagaatagacctaacagtttattattatacattgcattataaattgtactgtattggacgttacatgaataattcatttatgatctgtattaaatgttggatataaaattatgtgtaaattgtgtaataatagcacttggcagatagcactgaaatgttagttattaaatatccacaaaagtattaatagtttaagactatttgcttattgtaaacttttaagttcttagacattgcataagcttgttttaaacaattcctaacctataatagttatatttaagtaagatttactgaaagttttagcattagacaacttttagtaaataaaaatggaatttttgttgtcttttctttagggcctgttcacaatgagcttgcattccagcctcccatttccaatcatcctggtaagtgtatttcaaaattgatttcctgtatttagattgatttagtggtgattgaaacgcacaaacacaggctttaatggaattatggggtcacttctcagatgagtacaatactcatcatgacatgagttaatcaacagtttgagtagtcaatatagtcacacatagactgtctatattttattcagtttaactgtccccaaaagaaaagaactatcttttcagctaaaatgagaattacagaaatgctgacttcagcattgaatacataaatatgcagcagaataaaactaggtttcaaaatagaacagctgtaaaactatagcttaaaaagccaggaaagaatcttaagtacatgccgaaaagaaaaataattcactctattcaggatctctggttaactggaatttagaaactatttgattaaattgtatgcaaaagagtaaatcgctaagtagctttcttcagttcaaagtttgtgtataatttttgaaactgtagaggtaataaaacagaaaacacttgaaaataaaatactgaaagtcccttgtaacacaaacatagattttgaatttttttctcatcctttcgtatctgtttttcttagcataaaaagatgcaaatatattacttcagctaatcaccttaattttttggaaactataaactcaattttcctcctaattaaaagaaaattatgaagaattatatttttatttttacttgtttatttttgagagagggcctggctctgttgcccaaactggagtgcagtggcatgatctcagattactacagccttgacctcctagtctcaagcgatcctctcacctcagcttctagagtagctgggactataggcaagggccaccatgcctggctaatgtttgtattttagtagataacagggtctcaccatgttgcccaggctggtctcgaactcctgggctaaagcagtcctcctgctaataattttatttatttatttatttatttatttttttccgagatgggatctcgctatgttgtccaggctggtttcgaactcctagcctcaagtgatcctcctgtcttagcctcccaaagtgctgggattatagacgtgagccaccacaccaagcttgaaaaattaaaaaaatatatttttaaatgattttatttttgatctttgtgggtacataggagatgtatatatttatggggcacatgagatgttttgatacaggcatataatgcatgataatcacatcatggaagatggggtatacatcccttcaagcatttatcttttgtgttacaatctatactctgttagttattttaaagtgtacaattaaattattggctacagtcaccctgttgtgctgtaaaatattagaccttattcattctaactactttttgtactattaaccatcctcaccttcccccaatcccccactacctttcccagcctctggtaaccatccttctactctctgtctctatgggttcaattgttttgatttttagatcccacagataagaacatgtgatgtttgtctttctttgcctgggttctttcacttaacataatacctccagttctatccatgttgtctcaagtgactgaatcgcattttttttatggctgaatagtactccactgtgtataagtcaagcataaagaattttaagcataccggaataatacaggaagttcccccattgtactcattcctcagtttcagccattatcaagtaatgaccaatcttgtttcattcatactcactctctttcttcattctatattattttgaagcaaatcctatattagttttatatgtaaatatcttagtatatatttccagtaaaggtttttaaaacataaacacagcgcccataatgattaattcaaagggtcttaaattcttaaataggtctacataattttctttgtgtaaatgttctgttattgattatgttggtttaatttttcttctagctgtttaaaaaaatagaagggaacatctttgtgtttataacttttctcatattttagtttaagaaatttgtagaatttctagatcaaaaggccatattacagtgacaccagagtgtgagaaccagggttactgtgctggctagcagtagatgtcatagtttaataaactttttgctgatttaagaggcaaatacttgttctggttagggaaaaggtgatattagtggggcagaagcattcttttaacgatatatatttattatcttctgtaacggattttctgtgttacattgtgtgttgtgattttaaacatttttgtaggtcaaggggtctagccttttcataaactttctttttttgagaaatgtaatatacagaaaagtatgtaacacaagtaagtatatagtctaacatcactaaaaccaatactcatgtaaccactacacagattgagaactaaaacattatggcatcccagaaaccctcctaccccatgaattttgtctctgtcaaaacctctttccttctccccagaggtagctactgtcctgctttttatggatatcactttttttttgctcttttatttattttttaaatttttatttatttattttgagatgaactcttgttctgtcacccaggctagagtgcagtcatgcaattcggctcactgcaacctccacctccaggttcaagccattctcctgcctcagcctcccgagtagctgggattataggcacccgccaccatgcctggctaatttttgtattgttagtagagatagggtttcaccatgttatccaggctggtcttgaactcttggcctcaagtgatctctgccccatcggctcccaaaatgctgggattacaggcatgagccaccatgcctggcccttttaaagtgatgaatacatccctaaacagtctagtaatctggctttacttgttttttttttttttttttttttttgagacggagtctcgctctgtcacccaggctggagtgcagtggcgcgacttggctcactgcaacctctgcctcccgggttcacaccattctgcctcagcctcccaagtagctgggactataggcgcccgccaccacgcccggctaatttttgtatttttagtagagacggggtttcactatgttggtcaggctggtctcgaactcctgacctcttgatctgcccgcctcggcctcccaaagtgctgggattacaggcgtgatctaccgtgcctggccctcattttctttttacctagctttataaatacttgtttaaaacaatttaacatttggactgattgtgtaaagaccacttttaagtgttgttactgttttttgttgtgttttttttggccaccaaaacattgggtaattgttgtcttagacaatctctgtagttttggtttaaccagtgtacctatcagttgtttgctgaagcttcttgtccatagcataatgtgataccttcacattacattttctatagacaatatatatatatttttttaaatttttgagacggggtctcactctgtggcctgggctggagtgcagtggcactctcatggcccactgcagccctgacctcccagacttaggtgattctcccatctcagcctcccgtgtagctgggactacaggtggacacaaccacgcccagccaatttttctatttttcgtagagacgcggtttcaccatgttgcccaggctggccttgacctcctgggctcaagtgatctgcccatcttggcctcccaaagtgctgggattataggcatgagccaccatgcccggctgaaaataatttcataaatacttcaaaactggctttttaagaagacactcagtgaagacacttagtgtatcactggtttttatgttctaagcataatgaaatatatgtaaacaaatatttatctttgtgacaagttcattagagtgacatggcaaaacatttgagtttttaagtttttgaattatccaatcttcatgtgatctgttttgataactcctcattgcattggaaagtattttattgcttggcagcattttgaaaagtaattagggtacatagcttttacaagttgttttcttttaaaaaaattttaagcatcaatcatacttcattttaggttattttttttttttccgtaagatctgggtttcttttttgtcattctaagtaactttgttgaaagtaagattgttgaaagttttattgcttcaaattctagtttaaagttcataaacagcttattgagatacagataaatctttcttttaaatatgtcgaacctatttccaccctggggtctttgctttcgcttcctctttgaaatctgttcagtcttcacatagataaaaggttattcaggtcccatcttttcagatgggatgtcccctaccatccagtctgaagtgttcttcccaatcatctgctgttccataccctgttttattttcttcacagtgttcattgttatctgagttatttcatttgtttgcttatttgtctgcccctgcacctctgtgagaacagggactgtagctgttttgttttctactgtgtatgcagtgcctagaaagatccctagatactctgtagatatctgttaaatgagttaaaacaggaaagccaaataatttttatgtatttgggcttgatgtaataattgttgtttacaaataaaaattagaaatacttgatcagttgtctttgtaaaccagagtagcacctcttttttcccagtgatttaaaattatatattattgttcaaatgagtacactaaatacatctccaaagttaaaattgtggtagttaacatgacctgacttcactaaaaataccttttgctatggcataggtgggacaaatgaccttctacccaagagacagttgagaatctgtgtgtacaacaactgtgtgattagagtataattaaccttaactcagggatgggatagctgacttgcttatgcactttctctcaattagggaatctataaaaatatgtcatgagtcgatgttattcaaggacagttccctggaatacatcttagggtcagtgtgtttttaaaaaataaaagttgagactacatagagaatatgtgtagtcaaatgaaataccatggtaaaataatttattttagattctgattatttctgttctttaaattctcagttgacctggtcctttgaggtaagaaccaaattccagattttaaaaaatgacttttagaacttgaggataagtggtaattggaaattaaaaaaaaaaattagtgttttaagaacagtgctaagtactgagctagaaaatagaagacatggaaattcctaccttttaatgcattatgttattttaatccagttgttttgggtgcattacatttccatctcccctccctttaccctttcttttaggaaaaactgtgttgtggagtgcaagtgaaagccttatatctttctcatgggaggatgttctttcccatttatttcctatagctcctgagtattggtgttccattgcttactttgaaatggatgttcaggtaggagagacatttaaggttccttcaagctgccctattgttactgttgatggatacgtggacccttctggaggagatcgcttttgtttgggtcaactctccaatgtccacaggacagaagccattgagagagcaaggtattgattgtatagtcagatagttactttaaaaaattgagcatagtacattgtcttttattcaaggttatgttttcccatgtacattatatgtgttcttaaatataaataaaggaataaaggtcatgttgaaaactcagaatttgtaagcactccatcttaattgtcggtgtttttgttgtttaacatataatgataaaagatagccttttttatgttagtaggtttctatgtttcgaatagtaagtataccttttgaaattcagtttgaaaattttattttctgtgatcatacatttctacaaattactgaaaggaagtaatattaaatgagaacatgtttctgaaagttttacttataatgttaaaaaaattggtaataaaagggaaatggttaagtaaattatgataaatttttccttttttatacagtcattaaaatgtttaaaagtttatataatgaggctgggtgcggtggctcacacctataatcccagcactttgggaggcggagtcaggcagatcacttgaggtcaggagttcgagaccagcctggccaacatggtgaaaccctgtctctaccaaaaattagccatatgtggtggtgtccacctgtaatcccagctactcaggaggctgagacaggagaattgcttgaacccaggaggtggaggttgcagtgagctgagatcgtgccactgcaccccagcctgggtgacagagtgagactccatttcaaaaaaaaaaaaaaaaaaagtttatataatgaaatggaaatgcttacagtgaaatattacaggaacattccattttagctactgtatgatctcggcttttaaggatgtgtgtgctaaagaacataatcttggctctatcacttgctgtcatgtgactttggcaaattacctaacctctaagccattctgcctaatagaattttctgtgatgaagaaaatgatttatatttgcactgtccagttcggtagccactagccacatgtaactattgagcacttaaattatagctcacttgattgactaatcggatttctaattagttttaatttaatttaaatagtcacatgtggctagtggctatcaatttggacagtatgccttagtttctttatctaaaaaaattagaataatagtacttgttgagttgtaagggtttaatgagaattcatactacatgctcctgacacatagtaagtgttgtaaatatgtgcatcattattagatatgaacaggaaaagaaaaaaggaaatatacaaaaatgttaatagctatcttttggttttatgtgatctttatttttaatttttcaatattaagcatgctatacaatctgaactaaaatttaatttaaaatacttatcaagataaaatgtaatttcttttttcttcctaaggttgcacataggcaaaggtgtgcagttggaatgtaaaggtgaaggtgatgtttgggtcaggtgccttagtgaccacgcggtctttgtacagagttactacttagacagagaagctgggcgtgcacctggagatgctgttcataagatctacccaagtgcatatataaaggttagttacaattttatttgaatattttagacttaaagctctatttgttgtcaaaagaattgaaatctgggtggaaggaatggaaaaatgttttatatattaaataataagaaattgtgtttaagtataaaaaacacattttctgagggcatttattgacattatcagtaatctagttttatcgttgccaatttgttacattttgttttttattttatttatttatttatttatttatttttgagacagagtcttgctctcgtcgcccaggctggaatgcagtggcgtgatctcggctcactgcaacctgcgcctcctgggttcaagcaattctcgtgcctcagcatcccaagtagctgggattacaggcacatgttactgtgcctggcaattttttgtatttttagtagagacggggtttcaccatgttggccaggctggtctcgaactcctgacctaaagtgatccgcccaacttggcctcccaaagtgctgggattacaggtgtgaaccactgtgccaggcctgttacatgttttagagtaatacaaaggctcttgaaaatactgagtgaagcctccaaagttgtattcctgtaacttgaaatttgtaagaatcagactctggactttcatcttagccaatcttcaggattttatggaagagaattctaaaattaatagcttttcaaattaagaacctgataagcctgaaatatttttcactagttatatattcaacctgtttgaattttactttataatataacctgtttttgaaagagaaaggcagttgtaattagatagcctaaatatatttttaattgtgtgtcatcctcaacattttcattgtcagtgattgtaaattggtagaattaactgtgtctcataacttattaccaggaagttgcttaggataaaaataatgtagccccatagcatccataaaaatggaattgcctgattacctcacaacagcaaacccagtttctcatttccagttatagttcagttaaagaatgttggaatttttttatatgacacttttaaacatgccaagtatagcgaaaataataaaccacatgtacctatcatccagctgcaacaattatcagcactttaccaatctttaatgtgtttctcccccaacttttttttcctggagtcgttgaaagccaattccaaacagcatagtcactcataaaatatttctgtgtgagtaactcataaaatactcctgtgtaactcacaaatctatacagacttctgaaaaacataatcgcggtgctatttattacacttaataaattagcatcaattccctgttaaaattttcaacaatagagcatcagttatagtctgttagaacaatagaataaagcaataaagtattatatttattgataggatatccatgtgtatagaaaagttagttattaaacaatacataaggcctgatttagtggctcatgcgtgtaatcttagcactttcggaggccaaggttggaggattgcttgagaccaggagttcaagaccaacgtaagccacaaagtgatacccccatctctacaaaaaaattaaaaaattagctgggtgtggtggtgcatgcctgtagttttagctacttgggaggctgagatgggagcattgcttgagcccaggagttcaaggctgcggagagccatgatcatgccactgtgctccagactaggtgatagagtgagaccctttctcaaaaataaataaataaatagacaatacatagactatgatctcatttttgttaaatgatatcatgatatttgttatttgtttatatgtacccataagtctagactggtatgtataatggaattgtctctatgaggtggaaattatttgtattttgcagtttttttccacaagtaatttctgtattggttatttatgctgtattattattatttttgagacagagtcttgctctgtcacccaggctagagtacagtggtgccatcttggctcactgcaacctctgcttccagggtttaagtgattctcatgccttagcctctccggtagctgggattacaggtgtgtgccaccacgcctggctaatttttgtatttagtagagacggggtttcaccgtgttggccaggctggtctggaactcctgacctcaagtgatcagcccaactcagctcccaaagtgcaaggattgcaggtgtgagccactacgcctggccttttgttgttattttttaatggctttggatttccttatatgttttgtagtccattttgtattcgtgggccaagtttgttttgagagaattcactcattttattatttattttttcttcctgtcattgcttcaccctatgtggcaattttgccttaccctggcatctgggattcacatctcagaaccaaatcttataaatttaggaagtagggggactttgtctcctgaggaaattgagttccattctgcaggtatgcttggggcctaattcctgattgcctagatttctctgaaacttttccctgccgtgggcaaatattttattcctaggtgtacttctgaattggctgtattttaccagcacttgatttatgggcaggtgcccacttgtagcccccagagagtttggctgttgtctctctccatattattccaagaagtcaaattcctgttccctgccctttgtttatggtcttggtatacccctagtacctcctatctttagtctctgctctccactgtgggttttatttatcatcagtttggatgtatggattgtttccatatgaatttcatgatcagtttggagaggatgactattttaaatagtttttctgttatttgtatgtggttgaagcagagagagaaggtgattatgtatacccacttaacccatcttgactcagaagtctcttgttttatttatgtaatttaaagtgactggatagagaactatggtgttgaatatatactgtgtgccagatagtatttataaacttaatcagatatggagtagtatttaaaacaattgagcttaaataatgtggaatcgtgcaagtgtaatttcttggatgtcaaatagatacattgtgacttatttatattttggtacagatggcctttgaaaagcccccaaggtgtgagacaagtcatcacttgataaaccactgtcttggacagatcttaatagtgatctcatacttttaccatgaaaagtagataaataccttgttggacaagatatttggaatttaaaaaaatctcatttgtgtatattaactaagattttaaaataattatgtctgtttaccaagtatattactgttctttagaagagtcttactagtcagaaagagacagttacaagtacaaccccatccacaatttcactttccatggcttcaggtatccatggtcaaccacagtccaaaaatattaaatgaaaaattccagaaacaattcataggttttaaaatgtgcgctgttctgagtagatgatgaaatctcactccattctgcttgggatgtaaaaccttttgccagcatatccatgctgtctacattacccacccattagtcactgagtagcgagctcagttttcagattgactgtcatggtctcacagtgcttgtcatccagtaacctttatttagttcataatggccccaaagtgcaagggtaatgatgctgggatattgttaacattgttctgttttattattacctgttgttgttaatctcttactatgcctaatttgtaagttaaacttcattatgaggtatgtatgtataggaaaaaacatagtatatgcacagtactatctaaagtttcatgcatccactggaagtcttggaacatatcccccatagataagggaggaatactgtataccttaaaatttaaccattggcattttcttcattcgtttttttgggtagcagtaactaagggatttgtaagttatcagattttcacaggagatgatattattggggtaaattgtatgtagatagcatgcacccctggaaggagtgcccacactttgagtacacaaatgtgtgcatgcacatacacacacacacacatacacacacacacacacattcccctttttaattaaaatgaggaaaacacacttggagagccataatttcattttataagccaagaagctaggactaaattgtggtttttttcacccttctaagttgactttttttcctgcttctctcatgacatagtagtcattttttacttaacgaaaatctgatgtaatgaaatgacattttacaagctttaaatgaagcaaatgtttgaattctctttaagtggccttgttcttttgctttcaaaagtaaaatatgttttgttttgtgttatttagcactgggcgtttcaagtttttaatagctttattgagattttgagagagaattcacatgacatacaagtcacccatttaaattggacaattcaatgattgttagtatattcacaacattgtgcagtcattactactcaattttggagcattttcatgactgtggaaaaaaactccatatacccttttaactatcacccccaaatctccatttccattagctctagacaaccactattctacgctctttgtagatttgcctattcagggcattttatatagaagagaattatgtaatatagtcttttatgacttacttcttttcactaagcataatgtttcaagcttcatccatgtagcacataccaattcttcactcctttttatggctgaatagtgctccacacacattttgttcatcagtttatccattgatggacttgatttccactttttggctatgttatgaaggatactgctatgaacatttgtgtataagtatttgtgtgttttcatttctcttgggtacatacctaaaagtggaattgctggattgtaagataactctatgtaaactttttgagaaactgatagactgttttacaaaatggctgcaccactttacattctcactagcagggtgtgagggttccaatttctctacattctcatcagtacttgttatctgtcttttttattttagccattgtagtaggtgtgaagtataatcttattgtggtagttttgatttgcaaacttcctgtgttaatattgagttgggtttgtttttgaacacatttattttagaggaaggggcagcagatgcttctaaaccactggtggactaggtcagagggtattatgaacctcatttaaatttattcccaattaacactcattgtgattccctaagtcaagtagaacttagaatgtccttagcacaatcttgtttatgttcaggtgcatttttcattctggattactgtttcctaatgttaatttaagattatatagtattgcatttaagccttgtcaaaggaaaatggcaaaatttgactcctggttgtaaaagacaatatcctaaagatgttgtcagtgatctttatgagacacacatctttgttaagtaacggttttgtaataaattcagaaaacatggttaaataaattaaagcagaaattagctcaggagtggtggtcagaaatattttttggatctgagccaaaaagaatatttaaagcctttgattactttgaattgcctttgtcaacaatttagtcaaattatgaaaggaagacagtagcatttcaataatagctttaatttttatcatccagtgtaacaaatggaatctgttatggtatccgttatcaatggattagttacagtgtgaagtcaggaggcaatgcaggttttagttattagtgaacctaactgaataattttaggtcttctggtttgagtgctataattacgtaaataatctgtggaagggaggtttgctgaggtgcccaatgaatcatttttactgcatctacagatgcaagtcataaagtttaatccgtgtgggtaacctgtaatatgtgctgctgatgttagcatagattcaggctgaaacaatcctaattgcgattatttacaacacattggagagagcctatgtgtgacatattacttggttatttttttaaatgactcgtgggggtgggggagtgttaatgttaaaggcatacttgaatcttggagattataattaagttttattccctactcccagataacattatatatatatatatatatatatatatacacacacacacacacacacacacacacacacacacacacacacaccatacttggttagtgatgattaaaaaaaagtagttgtggagacctaaatgtaaaacacaaaactataaaacttctagaagataatataagagaaaaagtgagaactttttttttgagacggagtcttgctctgttgcccaggctggagtgcagtggtgccatcttggctcactgcaacctccgcctcctgggtttaagggattctcctgtctcagcctcccaagtatctgggatcacaagcttgcaccatcatgcctggctaatttttgcatttttagtagagatggggtctcaccatgttggccaggctggtcaggaactcctgacctcaagtgatcctcctgcctcggcctcccaaagtgctgggattacaggagagagccactgtgcctggccaagagaaaaagcgagaacttttaagatacaacatcaaaggcatgatccataaaggaaagaattgataggcctgacttcattgaaatgaaacacttctgctctgtgaaagacagggtcagagaatgagaagacaagccacagactgggtgaaaatatttgcaaaagacacatctagtaaaggactgttatccaaaattacaaagaactcttaaaactcaacaataaaataatgcaacaataaaataaacaatgggcagaatagactgggcatagtgattgactcctataatcccagcacttcgggaggtcaaggtaggaggattgcttgagcgcaggagtagttcaagatcagcctgggcaacagcaagacctcatctctaccaaaaaaaaaaaaaaaaaaattagccaggcatggtggcatgtgcctgtagtcctggctagttgggaggctgatgtgggaggacccttgagcccaggtgttcaagactagcttgggcaacatagcaagaccccatcttaacaacaacaacaaaaaaggcaaaagacatgaacaaacacctcaccaaagaagatacacatatggcaaacaagcatatgaaaaggtgttcagcatcataaatgtgtacaaacccatagaatgtacaacaccaagagtgaacccttacgtaaactgggttttgggtgataatgatgtgtcagtgtaaattcattgattgtaacaattgtgccactgtagtggggatgttgatagtggcggaaggttgggtgtggggacagggactctgtactttctgcttaattgtgctgtgaacctaaaactgctctaaaaaagtaaagtttattaatttacttctttaaaaaagtggttgtagagctatttaccttttcaaatgtttgagtccctgctttgttctgtactgggtaatgccttccaaatgtcatagcctagaagttctgaaacgaatggactgtgagaaatttgaggaagtagtggtttcacttctgggtgttgtgggctttctgatttctagaacctgactttgtcatgctttcttttaaatttaaatttttttgtggagttggggtcttggctggtcttgaactcctgggctcaagtgatcctcccacctgggcctcccaaagtgctgggattacaggcatctgccaccatgcccctgtcattgctttctttactaaagtattttaggacctaatagtccaggaaatacatatatgtatattggacaaattcatgtctgtttaaagaatagggtagtctgagtgttgtccttcattggtgctaattgggaaaagttttttgaggaaatggacactgagtagagaaataggagtaagtaggagtgcaatttgttatttggagagtgtatgttattgtatgtttttgtggttcatgtaaataccatggttgaagatgatcagaattttttcaagcatctgaaaattatggtttaagttctaaaactattgtttatcatcaactaaaaaattatgcattctcagatttctcttattttcaagattatttatgcttgcttgtattgggccccttatgtacgtaatgggactttaaaaaatattcatgtccttttagatagggagtatagccacatggttcagaaattaaagtgatttaaaaacagtggacattgagcagccttgcttcagaacctgtccttgttctcctttcctgcaaattctttttgtgtaatcttccaatgctttttaaaaatgcaaataaacaaatattttaggaagatttttttttccccagaaaaaaaggtgatgtgatttattatctgtaatttgttgcatattaaaagaacattccagtactttcataaatataagggtagatatggcaaccccttccttactatgccagttcttcacttggttgataaaagtaaaattatttattaacgccttaactcatcctgaaagataaatgactacgggggaggctaaaaacaaaataagtaactgtatactatgccaagtttgcaacaacctcatgaaagtatgtacacttagcattcccattttatagataaaagaaactcagcccatataattagcaggtatcggtgatgggatttaaaactgggccttttttttccttaaaaattatgaacatttacaaacaaagaaatgtagagagaaactaatgaagtcccatatacccatcgcacggattaagtagttacaattttatatttgtttgatctagtctttttgttgttgttgtttcttaagtattttaaaacaagtcctggatattattttgcttctatttgcttaaagtacgcatctctgaaaaatgttgatctctcttatatagcgacagtgccattttgttaaactcctccaaataagcaaaaatgataagacaaaaagttggccaggcgaccaaagctatcaactccagcctaaggaaaattcagcaatttgattatgaaagggggagggggacttcttaattgtacattttacacagatttccacaaggacagtaatagctgacccacttcgaactagataaaagatacagaggcgtgtggcagccaaagccatcatgatgttgacatgatcttcttggtgagctccaagccacctttcctaactagttttagaccaatcacaatgtacataaaagtttacatgttttaattaattcttttcatgtgagaggtataatgaaactgagttttaaataagtcaggcattggtttttaatgtatggaatttttctttatgaactcatagtatgaaatgttttttcttaaaaggtctttgatttgcgtcagtgtcatcgacagatgcagcagcaggcggctactgcacaagctgcagcagctgcccaggcagcagccgtggcaggaaacatccctggcccaggatcagtaggtggaatagctccagctatcagtaagtatgcttttcattcttttttaaaggtataatagttgatatttttatcttgatttactcagttgattagtttctttgagcagtaatagaaattaaagtttttttttactgggatgatgacatttttgaattggtaaaatctgttcttctgtaatagttgctttttgcctatgaccctgtttgcattctttttgtatcaaaaatggagtatgggatgaaggagaaaggggatgattattatattatactgttctatctcctccttttttgttgatgcttattataattctgcctcaccagccagggtgggttgtaatcactgaagtgcttggctttattctagtaaggaaagcatatttcaatttcagaattggacacttttccaattttttttttaaagtatgctaaacatggagagaaaactaagtgagggtggtattttgataacttgtagacttttttttaattttagggtaaaattgaactgtgtgccaggtttcacactgatggggaattttttactgcagagttaaactcctgactatagacttttatgatggaaacacgtggcacccatcttccacgtctgaaggcataactagtgattcattcaacccctgttcttaacctcttcagtgtggtaagcaaatcacactggctaagaaaactgcagtggccctgcaggtttctctacagtacatgcaaattcctcccattagtttcattgtaatattgatgaatgcagatggactatatgactgtatgttctgactggaaaattagatgcagtctccattgtgacttatgttcaggagtttacaatttagaggtagattaggcatattcattgagagaatttgattttttaaaatttggggtgataccattaatttgctggtttcagtgttataaacatgcttttactgaagaatccagaactattattaagtttcatattctcatcagttgccaccactgagtaatagtgtattactctgttacactttgaaattgagagagagacttcatctcggtcatctaagaggtcttagtggaactaagaatattaactgcttcattattagttatgtcttattctgaactaggctgtttagacagtaaggtttttagaagcaacctgtggacacgcactacctcttaaaaacaagttgtttcttatcccttcacctccacttctaaagaaaaaaataggtgaggtgttggtggattgtggtaatttactttataattggttgtagctagaagacacatgtgaaatgtaaagttccttaaccaaaagtgtgcagcttgttgataaagtttagatctactgttacttcttggcactttagcagagaagttatatgctgaggagaatgaaatacagaaagctggtcacttgattaatttagaatgtagggaggatgggaagagatcaccctgtccctctgatgtcttccaaatcttttctgttaggtctgtcagctgctgctggaattggtgttgatgaccttcgtcgcttatgcatactcaggatgagttttgtgaaaggctggggaccggattacccaagacagagcatcaaagaaacaccttgctggattgaaattcacttacaccgggccctccagctcctagacgaagtacttcataccatgccgattgcagacccacaacctttagactgaggtcttttaccgttggggcccttaaccttatcaggatggtggactacaaaatacaatcctgtttataatctgaagatatatttcacttttgttctgctttatcttttcataaagggttgaaaatgtgtttgctgccttgctcctagcagacagaaactggattaaaacaattttttttttcctcttcagaacttgtcaggcatggctcagagcttgaagattaggagaaacacattcttattaattcttcacctgttatgtatgaaggaatcattccagtgctagaaaatttagccctttaaaacgtcttagagccttttatctgcagaacatcgatatgtatatcattctacagaataatccagtattgctgattttaaaggcagagaagttctcaaagttaattcacctatgttattttgtgtacaagttgttattgttgaacatacttcaaaaataatgtgccatgtgggtgagttaattttaccaagagtaactttactctgtgtttaaaaagtaagttaataatgtattgtaatctttcatccaaaatattttttgcaagttatattagtgaagatggtttcaattcagattgtcttgcaacttcagttttatttttgccaaggcaaaaaactcttaatctgtgtgtatattgagaatcccttaaaattaccagacaaaaaaatttaaaattacgtttgttattcctagtggatgactgttgatgaagtatacttttcccctgttaaacagtagttgtattcttctgtatttctaggcacaaggttggttgctaagaagcctataagaggaatttcttttccttcattcatagggaaaggttttgtattttttaaaacactaaaagcagcgtcactctacctaatgtctcactgttctgcaaaggtggcaatgcttaaactaaataatgaataaactgaatattttggaaactgctaaattctatgttaaatactgtgcagaataatggaaacattacagttcataataggtagtttggatatttttgtacttgatttgatgtgactttttttggtataatgtttaaatcatgtatgttatgatattgtttaaaattcagtttttgtatcttggggcaagactgcaaacttttttatatcttttggttattctaagccctttgccatcaatgatcatatcaattggcagtgactttgtatagagaatttaagtagaaaagttgcagatgtattgactgtaccacagacacaatatgtatgctttttacctagctggtagcataaataaaactgaatctcaacatacaaagttgaattctaggtttgatttttaagattttttttttcttttgcacttttgagtccaatctcagtgatgaggtaccttctactaaatgacaggcaacagccagttctattgggcagctttgtttttttccctcacactctaccgggacttccccatggacattgtgtatcatgtgtagagttggttttttttttttttaatttttattttactatagcagaaatagacctgattatctacaagatgataaatagattgtctacaggataaatagtatgaaataaaatcaaggattatctttcagatgtgtttacttttgcctggagaacttttagctatagaaacacttgtgtgatgatagtcctccttatatcacctggaatgaacacagcttctactgccttgctcagaaggtcttttaaatagaccatcctagaaaccactgagtttgcttatttctgtgatttaaacatagatcttgatccaagctacatgacttttgtctttaaataacttatctaccacctcatttgtactcttgattacttacaaattctttcagtaaacacctaattttcttctgtaaaagtttggtgatttaagttttattggcagttttataaaaagacatcttctctagaaattgctaactttaggtccattttactgtgaatgaggaataggagtgagttttagaataacagatttttaaaaatccagatgatttgattaaaaccttaatcatacattgacataattcattgcttcttttttttgagatatggagtcttgctgtgttgcccaggcaggagtgcagtggtatgatctcagctcactgcaacctctgcctcccgggttcaactgattctcctgcctcagcctccctggtagctaggattacaggtgcccgccaccatgcctggctaacttttgtagttttagtagagacggggttttgcctgttggccaggctggtcttgaactcctgacctcaagtgatccatccaccttggcctcccaaagtgctgggattacgggcgtgagccactgtccctggcctcattgttcccttttctactttaaggaaagttttcatgtttaatcatctggggaaagtatgtgaaaaatatttgttaagaagtatctctttggagccaagccacctgtcttggtttctttctactaagagccataaagtatagaaatacttctagttgttaagtgcttatatttgtacctagatttagtcacacgcttttgagaaaacatctagtatgttatgatcagctattcctgagagcttggttgttaatctatatttctatttcttagtggtagtcatctttgatgaataagactaaagattctcacaggtttaaaattttatgtctactttaagggtaaaattatgaggttatggttctgggtgggttttctctagctaattcatatctcaaagagtctcaaaatgttgaatttcagtgcaagctgaatgagagatgagccatgtacacccaccgtaagacctcattccatgtttgtccagtgcctttcagtgcattatcaaagggaatccttcatggtgttgcctttattttccggggagtagatcgtgggatatagtctatctcatttttaatagtttaccgcccctggtatacaaagataatgacaataaatcactgccatataaccttgctttttccagaaacatggctgttttgtattgctgtaaccactaaataggttgcctataccattcctcctgtgaacagtgcagatttacaggttgcatggtctggcttaaggagagccatacttgagacatgtgagtaaactgaactcatattagctgtgctgcatttcagacttaaaatccatttttgtggggcagggtgtggtgtgtaaaggggggtgtttgtaatacaagttgaaggcaaaataaaatgtcctgtctcccagatgatatacatcttattatttttaaagtttattgctaattgtaggaaggtgagttgcaggtatctttgactatggtcatctggggaaggaaaattttacattttactattaatgctccttaagtgtctatggaggttaaagaataaaatggtaaatgtttctgtgcctggtttgatggtaactggttaatagttactcaccattttatgcagagtcacattagttcacaccctttctgagagccttttgggagaagcagttttattctctgagtggaacagagttctttttgttgataatttctagtttgctcccttcgttattgccaactttactggcattttatttaatgatagcagattgggaaaatggcaaatttaggttacggaggtaaatgagtatatgaaagcaattacctctaaagccagttaacaattattttgtaggtggggtacactcagcttaaagtaatgcatttttttttcccgtaaaggcagaatccatcttgttgcagatagctatctaaataatctcatatcctcttttgcaaagactacagagaataggctatgacaatcttgttcaagcctttccatttttttccctgataactaagtaatttctttgaacataccaagaagtatgtaaaaagtccatggccttattcatccacaaagtggcatcctaggcccagccttatccctagcagttgtcccagtgctgctaggttgcttatcttgtttatctggaatcactgtggagtgaaattttccacatcatccagaattgccttatttaagaagtaaaacgttttaatttttagcctttttttggtggagttatttaatatgtatatcagaggatatactagatggtaacatttctttctgtgcttggctatctttgtggacttcaggggcttctaaaacagacaggactgtgttgcctttactaaatggtctgagacagctatggttttgaatttttagttttttttttttaacccacttcccctcctggtctcttccctctctgataattaccattcatatgtgagtgttagtgtgcctccttttagcattttcttcttctctttctgattcttcatttctgactgcctaggcaaggaaaccagataaccaaacttactagaacgttctttaaaacacaagtacaaactctgggacaggacccaagacactttcctgtgaagtgctgaaaaagacctcattgtattggcatttgatatcagtttgatgtagcttagagtgcttcctgattcttgctgagtttcaggtagttgagatagagagaagtgagtcatattcatattttcccccttagaataatattttgaaaggtttcattgcttccacttgaatgctgctcttacaaaaactggggttacaagggttactaaattagcatcagtagccagaggcaataccgttgtctggaggacaccagcaaacaacacacaacaaagcaaaacaaaccttgggaaactaaggccatttgttttgttttggtgtcccctttgaagccctgccttctggccttactcctgtacagatatttttgacctataggtgcctttatgagaattgagggtctgacatcctgccccaaggagtagctaaagtaattgctagtgttttcagggattttaacatcagactggaatgaatgaatgaaactttttgtcctttttttttctgtttttttttttctaatgtagtaaggactaaggaaaacctttggtgaagacaatcatttctctctgttgatgtggatacttttcacaccgtttatttaaatgctttctcaataggtccagagccagtgttcttgttcaacctgaaagtaatggctctgggttgggccagacagttgcactctctagtttgccctctgccacaaatttgatgtgtgacctttgggcaagtcatttatcttctctgggccttagttgcctcatctgtaaaatgagggagttggagtagattaattattccagctctgaaattctaagtgaccttggctaccttgcagcagttttggatttcttccttatctttgttctgctgtttgagggggctttttacttatttccatgttattcaaaggagactaggcttgatattttattactgttcttttatggacaaaaggttacatagtatgcccttaagacttaattttaaccaaaggcctagcaccaccttaggggctgcaataaacacttaacgcgcgtgcgcacgcgcgcgcgcacacacacacacacacacacacacacacacaggtcagagtttaaggctttcgagtcatgacattctagcttttgaattgcgtgcacacacacacgcacgcacacactctggtcagagtttattaaggctttcgagtcatgacattatagcttttgagttggtgtgtgtgacaccaccctcctaagtggtgtgtgcttgtaattttttttttcagtgaaaatggattgaaaacctgttgttaatgcttagtgatattatgctcaaaacaaggaaattcccttgaaccgtgtcaattaaactggtttatatgactcaagaaaacaataccagtagatgattattaactttattcttggctctttttaggtccattttgattaagtgacttttggctggatcattcagagctctcttctagcctacccttggatgagtacaattaatgaaattcatattttcaaggacctgggagccttccttggggctgggttgagggtggggggttggggagtcctggtagaggccagctttgtggtagctggagaggaagggatgaaaccagctgctgttgcaaaggctgcttgtcattgatagaaggactcacgggcttggattgattaagactaaacatggagttggcaaactttcttcaagtattgagttctgttcaatgcattggacatgtgatttaagggaaaagtgtgaatgcttatagatgatgaaaacctggtgggctgcagagcccagtttagaagaagtgagttgggggttggggacagatttggtggtggtatttcccaactgtttcctcccctaaattcagaggaatgcagctatgccagaagccagagaagagccactcgtagcttctgctttggggacaactggtcagttgaaagtcccaggagttcctttgtggctttctgtatacttttgcctggttaaagtctgtggctaaaaaatagtcgaacctttcttgagaactctgtaacaaagtatgtttttgattaaaagagaaagccaactaaatcattatgtgctcattctttttcttaagcttgtggatgtcttggatctggaaagggtttctgatcacttagagaattttcaaactttaggtcaacattttcctttattgccttgtggccactgaaatgggaaatgtgacatttaaaatatgaccctggaataacagtccccattcttctctcatttttaaaaggagaaggtgaagtgatggtgatcagagagatgggtgctagggaattataagaaccaggatgcttaaaggagaggtaaaattggaaattggagaccctttcattgcccagctaagggataaggaaagctgtttctctcccatctgccttctctgtgaaataggggtcaatgggaggggagtggtggtcaggtaagtagattccgtggcaatggcttgtatataacaagaccacatcagcattttatttctaagcttgctgacatgagtttcagagagtttatcgggctgagagatttcttctcacctgtttgctaacctgaaatttatagtattttaggctagaacttgaagaggatagtaggttagcattcagttgagaaaaaggaaaaacattgtggagcacttcaggt

SEQ ID NO: 13 - DNA, 77135 bp, Homo sapiens
gcatctgccatgaagaaagtgcagtgctttgagaactagaaaaagcagttaaatttaaggccttgctttacatttcggagccgccatcggggccaactggaggtatgactttcctgcacacaggagcaagctgaaaactgccctgtggctttattccacgttcacccctgcagcaaatgccttttctgtgaggaactacgggctgatggggaatcagaggtggttcttcctaagtggcgtttctgagtgggttccaggagtccacagtgactttaagaggcaggctacctgggggacagccaggccgtgagacgagaaagttgtacagtaacattgctgtgtgcccataagtttgtatcttttattagattagataatatatctcacatgctgggttgttaagcaaataaatatgtgtaaggaaattacaatccacataattacatgagtcgttttaaccaccactcacccccagagtgattagattttcttctgcctatgccattgcggcccagttgctctgtcactgtccatggggacaggatccccttactccgaaaagcaaatcaggaacaaacagggcaagtgagagtcactatcagggcccagaaacatgtgaggaacagcagctcagaagggtctccagactgatgggccggtgatcctatattcttgttgggctgacaactcttctggtttcgggctccaggtgctggcaagaaatctcagaggtggggtgggagagagagacgcgaggcgacccacgcagacaaagggctcccaccccacccccgggccaccccggcaggccgggcaggggccgagcctggggtcgcgcagggggaccgagagggcagcgcggggctgggggtggggaagaggcgggaaccgagccgcaggccgctgcgaggagtactaccccgccacccccgcgccgcgagtttccgcgcacgtggccgtggggccggtctcgctcccgccccccgccgggcccgcgcagccccctcctctgcggctcccggagcggccagagcgcgcggcggcgggcgggggcgggccgcaagcagggctccctggccgctttccaggtcggcgcactaatacgggcgatgaggcttcgcggctccagtctgactgacgccggctggggccgccgccgccgccgccgccgccgccgctgctgcagccgctgtctcggtccccgccgccgccgccgggccctgcaggcgctgggcgcgcgcagccaggcagtgagtgcgcggcgctcggagcgggcggccgggggaccacggcgggggcggggttgggggcgccggacctgggtgggggagggatgagtggcacggcggggacaggtaagacgtgccctcctcggccgcgcgctgcttgtgtgcgtgcgtgtgagcgcattgagtggagggcgaagttgttcgtcctcggggcagcctgggaggctcctcggcgtgaggcttggcttttggcggtcgttgttcccgggttttttggtggagcctgtctggggtggagtggggtggggtggggtgggcgcggggccggaggggactgctctggggagttggccgcggcgcagctcgccttcctcgcgcctgcatccgcccgcgccgcgggccccgggacctgtcaggggatgttcgacccgcggcgggggcggcggtcgggtcggggctggggcccggggcgtgggcagggaccaggataggcgcctgaggggtcgcttgctgtagctggagataggggacagcggacagagggggcggcgggggtcgtcattgtgactctttgggggccacttttaaactcgccagcgccgaattggcctcacttgccttctgtttcgtaggctttttgctttgtttacctttgaggcatgcgaactgagaaaaaaagttaggaatgttgttgaagtgtctccgggctcgcgcttggactgtgtcggagccggggtgtttgtcttttccttggcccgcccctcggtgccagctctccgcagaggggagggggcgaggtgggaagcagatacaggagactgcctgacgccagctttgtgatcggaaggaggagcgctgggagaacatttttatggatggctaatcgctgacaagttttcccgttactattccttcctcctcctgcccttgaccgtggacatttgaagtgatagtttggaaatactacgttgacttatttctgggctggagtgggtactcctgagaactaacctacaaaggatacaaatcgagtttggagataaaattgtatgtaaattctttacccagtagtttacagtgagaaacacacccacagggcactgtggagtgctttggatggatccagtttactagtaccatttcggtggcttgccagatttctcggatgatcttttggaaatgtaggttagcaagaagcatggaggctgaccgttaagtcgtgaggcatttaataatgctgcctcctaagcagtaactgagcggaacgtttgtggcacccgtctgggaaagtgaaatgtgactactacaagcatgtctcctgccttagcattcctccaagtgtgagggaatgcctttggatgtttacattttaaaaatagtgatctatatttaagaaggcatttaaaataaaagccaaagacattctcaactccaaatagacaaagattcaatataagagtttccctgtgcttgtaggaaagcatcagcacaattttagactgcttttaggtttgtggttatccaagaaggaggcttcagataagaaaaggatgtgacgctttataaataaggagcattttaaatacaagatgacagcaatttcaagtactgtatccgaaaaacaacttttagtggtaatagtcaccttcagtgatggcaagacagctgtctgccagacagccttcggcctcttaatgtattctgacacaaccaactcccatttttatgcttgactggttatctttgtcagagctgttttatgcttgagctctctggtttcaaactatgcttaagagaatgccaacatactcttgatctgaacaaactcatgtttatcagtgcagtgtttactaaaaatcaaagacgtaaacaaattttgggttaaacctctaagtactttagaattgccacatcattgtcatcagtctttcaaagtcaacatgaactatttggcttttctcctttaaaaaatttttttaacttatatattcctagttagtaagtaatcagaaaatattcacagatgtcaactcttgcatctgtgattgcccaagacatggatgagaaagaagagttttgttttgttttttaaatgaaacattactaaagatatccataagtaataaacaagtggtacactatctttactaatcatgtggtcagttggagggaaaaaagtctgtccagaaattgtttcataaagatgaaaatattcaatgtcaatatgaaaatactcaatatgttttccaaatagtttaattctgattaatgagagtgcactatgcattgccaaactggagggatggtgtttcgtaagtgagcaccgtaggattaaggtaactactttatatctgacattccctctgtaataaataggacagcagtttcatcatgttctgctttaatatgtgggaaataatccttatccacaggatgtactctgattttagggaaggtaaaggttatgacaaatatgtggtttttctgatttgccagacatactatgctaaattttaaagctttaacgaagcttagtgcagactttctgtatattgttttggacacttagagaggagttaaagaaacgggaaactgtccagaatgaaacagtaaatatagcagtacgttgaaaccatgaatcttctcaaatagttgtaattctaggctgttggatttatatttccttggttactgttgctagtgggttgaaaagttattctaaagcaaaaaaaaaaaatgcaaacagtaaatgcataagtacttaacaatactgtgagcattttcacaatgtttcatgttatcctggtgaatgtccatgtcctaagtaaggacattaaaaaaataaacaattatcccttggtaataaactaaccttttaaaataaatattccggtaaattttgtctcttaagaaacttgtgtcaactaaagttgttaggatttcaagatatctgttagcattaggagtcattatacccatgaaaactggatgttcttcttgcttggtggtcttcatcctgacacttcctaccccaaaaccatgacggacacctcggccgcacttgcctgacttgtattctgctctcctttggtgtcggcttccttttgtgttaggctgacccaagaccacttttccaggcttatcttcccggtctttccctattttatgctgcagttaaaatagcaaatgctagtttccatgcataccctggctttcctctcctgtgcacctttaccccacgctgaggccttcccagcttccccacctcccacaggatcctcaaatatgacttcttcatcttgtatgccctgttcaggcgctgccttcacgggactttctgtgatgaccctggtcccaggtatgtcctccttcgagctcctgtggctcttcgccttttcaactcttacctgttttgtattaagttactcatagactaatttatttcttcccctcagaccatccttacaagatccaggaaggaagggactgtttcatctaccttttttattctctgaatgctgaccacagtgccctttatagtactctatcaataaataacaaatacatgacacattttttcactgaacccatggtccctcctgaaataaagtctgtaaaagcatttcacccataggataaagtccatctttcaagaagctggtgttgaatctgagctgaggactagttcagaggcctgaaatcccctcagcccagttgagagcctccttctcctgaacattgtggctgagcattacagtcaggaaaagcttctatgatactcttattgcattagcagttttccatatcagattcactaaatacacaatggaagccatttagtagaaaaacagattttaatgtgatacggctaccacaatgaaacactaatgtgattccacagaaaattgctaacacgatatgctgattcctccccccaccatagccgcataaaaattgatactgtttttaatgtatgtgtttcaaactatgctcacaaaagaaaagcagactgctactgagatgagctgctgctttgttcacgttggatgtgtaaagggtcttgttatcagcctcgtcaggcagaatctgccttctgtgccttggtcattctattatcgaacaatactaactctcattttaaaatatatcatgttctgtgtaacaatccagtattaaagttaatatgatgtgaaaaaatagaatttgcttataaatgtcatgcccatataatatattcagttgtaccgttttaattgggaagctctaatcagctcaaaacgcatttttcaagaatcaaaacgactcccaatataaaatttaaattcagaatttaaaataaaaggcataaatattaaggtggattgtatatgtgtgtgcacacggttgtaacactttagaagtcataagcactgaagagattatggttcttccccctcattcccagcccacatttaattcaaagaaaaaagtttaacccaaagaataattgtaaaggagacctatgtagttctgattttttcctataatgacaatttccaattcctcttttttagatattaaatatcaaaatcttctctctctctctctctctttgtctcattctttggtactctgattagctgattcactggtggggattatttttatgtgaatttccccttggggaaatttaatacttaatatctgatcacttccttttctttttcatatttaattctgagggactataaatagaaaacatgtactcctcagtcccgaggagagtttggtgctgcagttgcgaaaagcaatcttcagtttacaagcactaggagtgccagggatgcccattcattctaggactccagttgccagttttctatcactgaacaaaggaatctggatagcatacatgtggtcttgcggccattcaaacgtgttggtgacattggggattctgagttgaggattctgacgacttagagtttgcaagtagtagaagtgtgaacactgtgaggtagccacatcctgaactcactgaccccaggagcacatccctagatacactgggccatttgccttaaatgactgctttaatctatggaatatcttcttccatacagcctgttttttacttttcatctgttaaagtgcttagaagcctatcaaatacagatttactttggttactgtgtattttgatttgttttcacaaaacgcaataattgtgcaatggttaatgtcattctaaaggattttgtcctacgtacttgtgggctatggaaagcttacagcagatttgcaggtcttttttaagaagcatttgatggatggtagcgttcaactgaagtgccaggagttgctttctgaattcttgtatctaaatttaactgacttggtagtaccacatttcaggagttaatggtaacgcagaaagggattcacagattccatcagtttcccactttgtggcagaatatttgacatctcttatcagtacacttcatcataagttcatgaattcatcttgctcctttctttgctgagaatcacagtgagagaattggagtttggctgagaggaggagtgaggaaggaagaaggaagagtaagtttttttttgttttgtttttgttttttgagatggagtctctctctgtcgcccaggctggagtgcagtggcaccatctcggctcactgcaagctccacctcccgggttcatgccattctcccgcttcagcctcccaagtagctgggactacaggcacctgccaccacgcccggctaattttttgtatttttagtagagacagggtttcaccatgttagccaggatggtctcgatctcctgacctcatgatccgccggcctcggcctcccaaagtgctgggtttacaggcgtgatccaccgcgcctggcccgagagtaagtcattttaaggcttgggcagtagcactgttgagaagtttgaggcacctaagtgtggaaagagggtgttacagaaagcagattggcagatgccaaaggtagacatcacatatttgaattagtgttagtagtatgaaaggcacctgcgttgtgagttgagaggatcctagtgagctggccagggaagtacattagcactcatgacattgttctaggggaaggtgaattccagtttccaaataactatgcaggattgaacaccatttgttcataaagcaagaccaccagtgattgatgatatgggtgattattattaatgacataagtgattattagaagccaagaatggtggtaatgaatgtggaagatgaaaaatgtgttaagctaaaaagattttaggtctcatgtggttttctttgtcttgtttatgcatttagtcattctttgttttctagtggaagtagaattttatttttaggaataggagttgaataaaatatttgtcaaagacaaacatttatggacatgaatgcttccctttcagcttattgactatatgtttacacaaagcagtcattaggtgttggctgtgtttgcaaataatgacaagttggtattatttcaaaggagtggcagttttacttgctttctgttgtcattgcatctaattttattacaagatattctaaatacactttatttttttaaagttgtattgattatatcttggggttttaaagtgttgcaattttgtgggtgtagcaatcactttagaaggtggaacttgtaaatttatggggcttgtataggatattcattcaaccattatttactctgtgtctattgtgtctaccctgcctatgaggccccagaacaggccctggggactacacaacgaaatgaagtgacaaaaataaaatcctagtctccaggatttcatagtgtagttagcgtgaaagagatcaagaaagcaaatattaaaatatttctccaatagtaagatgtcttacttccccaaactgtaatctatttgggtttatttctctattcagctggccctgtgagtcagcagtttctgcatcaacagattcaaccaaccacaaatgaaaaatattggagaaaaaattaaaaataacacaaataaaaaataagatataaaaaccatttacatagcatttacagtatagtaggtattataagtaagctaagatgatttaaagtataagggaggatgtggtaggttatatgcaaatataccattttatacgagggacttgagcatccttggattttggtgtctgtggggattctggactgaatcccccatagatacctggggatgactgtatttttcctgattagacttccgtattttctgtgtgtgaatttttagttagtcttgtcaaggataatgagaatgatctcatttgggatttgggaggtaaactagaaggtagaggtaaaatagaagacataaacaggaagagattctttcagtaagtccttatgagaacttagagatgctgagaacatccctaggccatggaatttcactacttcctgagtctgtcaggaggaggatccagcctttgtacagtttcctcctgtttttccctgctaccctttactggttcaagggtgagtgagtttgcatggctggtcctataggaaaccccacccaacccttttagccagccaggggcctccagaccactttgaatacactcttctagtaactgttgtaatagtgcacctattacttgcctgataataatatgtttagattgctgtctcaatagtagtatagaggaaagggaccatgtcttatcttgaaatattcagctgctagggtagtgtccacttcattgttgatacttgaaccactccacctttcacttccctaaatatgttgggttttcaacgatcccacctttctcttccctaaataggttggtttttgtagggtaaggtggaaggaagggcaaggaatttggatttaatctgtaggcaaaggagaactattcaattttaacccgtagtcatgataactattaaatggtttgaacagaagaatcacataatcaaaggggtatttggaagagtgaagacaaattcaagtggtttgcatgcttttaaatggccacaactcctagctaagcagttgacacaccatctccactgcttcatgcttctctttagcaaataaaaatctgagcttccccgactgggtgcggtggctcacacctgcaatcccagcacttcgggaggctgaggtgggcggataacctgaggttgggagttcaagaccagcctgaccaacatggagaaaccccatctctactaaaaatacaaaattagctgggtgtggtggcacatgcctgtaatcccagctactggggaggctgaggcaggagaatcgcttgaacccaggaggcagaggttgcagtgagctgagattgtgccattgtactccgtcctgggaaacaagagcaaaactctgtctcaaaaaataaaaaataaaaaataaattgagcttccccgaacagcagttcataacacggcttatttgtgattctttatcagtttatgaactccacccgccccccccccccccaggcagcctttggccgggaaacagccttcctcgagacacacatctataaaattttaaaaattgcccacacatcattaaaaatatatatattaaacagatgatttatagtcatttaatactttacaagtattcagacagattatgctctatataatattaccttaagtagatagactatgcataggaagtagggaatgcattatataattctgtctttcaaagaaatttattgtattgcgttagtaaagcaatgggctttaggttagaacttcaattaattacatggggcttaatgatacaatagttggccaggtgcaatggttcatgcctgtaatcccagcactttgggagaccaaggggggcagattgcttgagcccaggagtttgagaccagcctggacaacatggtgaaaacccttctatgagaaaaatattttaaaaatttagctggtcttggtggggcgtgcctgtagccccagatactcaggaggctgcagggggaggatctattgagcctggcaggttgaggctgcggtgagccatgatcacgccactgcactccatcctgggtgacagagcaagaccctttttcaaaatagtaataataatattaataatacaatagttaatggtattgataaaactggattttactttcattcattcaacatttattgatggcctcctgcatgctaggtaggtagtacagaccacaatgtggcttggcttgtggcctgatagaaggctaggcatctctggagaaaacacttaccaaatctggggattcaagtgtggtaagtgctgttgtgagtgactagcacatgttaggtgctgtggaagcccagaggagcagcagagagctgatcagtgctgttgcctgggggcctccagggaaggtttccaggaagttggcttccagctctgttttgaagaaggagcaggaaagatagagctgcacaggggccttctgggcagggagggaaggagtgatgggcaaagggagtgaaaagagatgaggctgggaatgtagtctggggaggccagattgcgaacagccttatttgaaattgatgttacaggcgtcaactcacaacccccacctcatgatatttagtgggcttttaagtgtaaaatgtatggatacagactcagagtagaaatttgggagattcactcttggtggtgtacattctgtgggtttggacaagtgtatcatgacgtgtatccaccatggtagtatcaggcagagtcgtctcattgccctgcaaattctctgtggtctgtgttttcatccctccctcttctcatattcactatggttccatctctacatttgaacatagtgtatttgaggatcctggagtcaatggtggttaaattttagtttaaagagcttgtttttaatttttttttttttttgagacggagtctcgctgtgtcccccacgccggagtacagtggcgcgatctcggctcactgcaagctctgcctccccggttcatgccattctcctgcctcagcctcctgagtagctgggactacaggcgcccgccaccacgcccggataattttttgtatttttagtagagatggggtttcaccgtgttagccaggatggtctcgatctcctgacctcgtgatccacccgcctcggcctcccaaaatgctgggattacaggcgtgagccactgcgcccagccggttgtttttaatttttggggcacctcttaactcccacagtgaagcctacaggaggaataaacagaagtatacctccatgttggtaatatacaatattatcttagtttacagttttcaaactgctttctctcacatcccctcagtacttctgcacaaaaggtagtgactattgtttccattttacagaggaggaaacaatatggaagtgactaattacttgaagatgacagtgatggtactagcactcagactggagtcttcttcctccattcttgtgttttattcattatatcatgttgcctcttgcttctggaagcattaaattgtgggcccttccaaacttaaataataaaataacacatttgtggggtggcatacagtgtttccaagaatatgctgactatatgtgtgtgtaaattatatacagtttattacgtatgtgtaaagaatgtaggttgcaatactagaaacttacaccatgatctctacaaggtagtgctggccttctcttgtatcactgttatgttggcttatcactgaaatgtttaaatatgatcttaatattcagactattacatggaaaaatatagaacattctaaacctaccttaagtgacccaaactattgggcatgacctttagactcctgtctttgctgctttaatgcccattctacttccctttcactacatagcaaacaggcaatggaatagtggttctgtcttccaaagaagtgataatgagcaacaataaaaactgtatctagtttctttaatttaaaaaataattcaaaatctccgttgaaactttaaaaatgatatccaatcaatagtaacattctagccaaaaaaactgtacgagtggccaagagaactgtattttagggatgtaagtaaatgtagaccaaggcttcccaagtggcttattaagtataaattccagtgacatctgcttaccatagtacttcattgccatgagcacaaggctgcctggtaaaccaagagtcttcatttgggccacatatatcccttgtagtcatggccttcagtttcatgtgaaattcagtgtgaatataaaaaatccagccgttattggagagtctctgattttacagtgagattgtgtgtgttctttctcctcccaccataattagttgtttagttgctaatttgtttttattttcacttcttttttttccttttgactattttatcagatgcgattattatgtcacttcctctgggccacagtatacccaaattcaggagtgatgatgatgtatttttaaaatgaacttcaaatattctcatatttagttgtgtattgtaaggtaaattcacttaacccaataatatttttatgtagtagattctattctgttatattcctattccaggagggatcctaaagtcagttttatgaaagaatgaattttgaattttgtgaacttttcaattgatttgaagtcatggagactctggggtattagtaaaatttagcataacagaaatttgtatttctgtcttctttcagaatgctcacagttgttgaatctaggaatgtttgttgtatttaattatttgttttgactgaagaaattttatagtttgcattacaagaataacttgttctgagaaaatcaagctgaataatactgattcatggcatgtaacattgctgttggatggttgtgaaacagaaaacagatctcattaaaaaaggtttctctagagattgttccatattttctcccctttttagtatagaagcaactgttattttaaaaacagtactttcttctccccctcaaaaccaccaccatcagagaaaatggatatgtttacattaattggcactaagtagaagaaaggatctgaaaggcaggcagcctgctggggatctcatgggactggctgtccttcagagagggtgggctgctgaaaggagattaacctatgtaactgggcctgggcgagtgtgaagatttcccagcattttaccttatcagggattctgttttcttccaaggcttccaggtaccgatggcacattattttctacctgaaaattagagtttattaaaatacctctaatttggcagagggagaaactccatttgtaaaatcccttgaaggtagtgatgaagcaaattactataacatttggataggattttcctttattgtgataaaatataaatagtaatgcaatttaccgttttaacatttatttatttatttttagagtcagggtcttgctgtcacccaggctggagtgcagtggtgcaatcatagctcattgcatcctcagactcctgtgctcaagccatcctcttgcctcagcctcctgagtagctgggattacaggtgggtgccaccacgcctggctaatcaaaaacaacaaccacttttgtagagatggggtctcgctctgttgcccaagctagtcttgtacttctggcctcaagcaatctttccacctggcctcccaaagccctgggatcacagtcatgaaccaccgcacatggcctcattttcagcatttttagtcatatagttcagtggcattaagcacattccggttttatgtacaactaccaccctatccattgccagaactttttcatcttcccaaactgaaactctgtaccatttaaacaatagtccccattttccccttctcttagcacctggtaaccttcattctactttcttctctatgaatttccctattctagatatttcatataagtaagtggaatcatgcatcatttgtccttctgtgtctggcttattgcactcagcataatcttttgaaggttcatccacattgtagcaagtgtcaaaatttcattcctttttaatggttgtgtagtattttattgtatatatataacaatttgttcattcattcatttgttgatggatgtttaggttgttttcactttttggctattgtaaataatgctatgaacattgagtacctattttcttgtttttggtgtataattaggagtgcagttactggctcacatggtaattctacgtttacttttttgaggctctcccagactctctcccacacctgctaagccattttacattctcatcaacaatgtgcaaatttttgcacatccttgatttttacacattgttgctgacacttgttattttctgttttgttaacaagagccatcctagtgggtatgaagtggtaccttgtgattttggtttgcactcattcccctagtaactaatgatgttgaacctccttttatgtgcttatttgccatttgtatatcttctttggagaagtgtctattctagtgctttgcctcttttgaattgggtggtttgttttttgttgttgttgagttttaagaatttttaaatatattctgttaacttttttcttttttgtctcaatttcctggtgatgagatatattctggatgtgtatcccttatcagaagtatgatttgcatagaatatggtttttagtgaggtatttctcgagaaactgcatttttttccatttatttatgtaagtgtcttttcacatctaagatacttacgtggaattccataacatacggtcatataaataaaaggaataaaacattttttaaaatttcctgtttttaaaaacccaccaatttttgttcacattaattttaaataaatcatggttagaataaaagatacctagccagcataagagataacagtccagtgtgtgatataacattcaatgacacagcatttattcttcaaatgaaatttgaagggccatttggcctttgtggctgtagaaatttgatcagtgaagaaaaattagctgccattccttagagtctttgttatttttcccttggtgttctccttatttaaaactttcgtttgatttaagagttgtaaagcatgtagattagaaataagaattttcgtccaggcgcagtggctcatacttgtaatactagcactttgggaggctgaagcgggaggattgcttgagacatagcaagaaaatatagcgagaccctatctttattttcaaaacaataaacaaaacttttaaaaaaatataacaaaggatataagtttttttttttttttttttttttttttttttttttttttttgagacagggtcttgcccttttatctaggctggagtgcagttgtacaatctcggctcacaggagtctcgaactccccagcctcaagtgatcctcccacctcagccttcctagtagctgagactataggcctgcagagccacacctggctaatttttgtttttttgtttttcgtttttgtttttgtagagatggggtttggctatgttgcccaggctggtctcttactcctgggctcaagccatctgcccgccttggcatcccaaagtgctgggattacaggtgtgagccaccgtgtctggccggaagtaataatttttaaaacggctccagttctgccttttcatattgatatattgattagtattactgaaaatctggcagtaactgtaactaacaaaagaagatactcaaaagaagtgtaagaccttttgaacaggataagaatgattaagattttcaggaagagtgaattacaacagagaaagaatgggagtggggtaaaacaaccaagtcgatttcaagtaattaaagtctagatgagggtttctcaacctccactctgttggtattgggagcccgatcattctcaggactgtcctccaacttgtaggatgtttaacagtatccctgacctctgcccactagaggccagtggcacctccctcccccagttacaacaaccaaaaatttctgtaggcattgccagatgtcccgtggggggcaaaatcatctccgtcttccctcagtgctcagtgtgataatagcctgagctgagttctgatggcagaatggtgataaaaggatgaaaacaagtgaaatctcaagtaaaggaaaagaagaaaactatcaataattaatatgtattaagcatctactatatcctaggcaccactgggtgctatgctatggtcatttaacataaataacaataagaatttattgaacacctcttttatgggagagattggagctacagaaatgagtaaaatacttgctgcctttaaaggctttgttgttcaataaagagacaaatggacaataaattgtagttccaagtgaaaatagaaatatgtacaaggtactgactgagaagataattttatttgggggagtcacagagtcctgggatgtctgagctgtggttgaaggatgagtagcagtgttgccccttggagtgggttttgcagatgaggtaataaattgcctgaggcaatgtatttgcccatggccttttagtggctgaattgaagaccaagcaggtggcaaagctctctccagactgtcactgccgtccagggaataaaaggcccagaccataattaaagctgggatgattgcatagggcaattatacattttccctgaggcttggatagagcgattcgcacctggcaaatcccagcgccgtgcaattttagtgacagtttatacacttcacatattgttgtaaatcattatccaggcaaggaagatcaagagtcgcatatctaactcccaccaggtatcagactgcctgccaagttacattgacgacacattgttgattttgaaaaaatcaaataagaggtacacttgcatcctctgcttaacaatttctttattaaccagcagtaggtgtggtgtaatggaacctagaaacagatgggaccatatggcttgatttgtggagcggcaatatattgcttaatctcttacatagcagtatttgctatgtaagacaaatagttattcagtggcagtttacataatatatattaacagtagggtgctctttggatttccataattatttatattttaaatattttacattggaaaagtaaatagtatgcatcaaagaaaattactaatgagtttcttaagctttatcacgtgtgccctgtaattctgctttttcttcactgccttctgttccattagcaacagtaatgttcagacttgctgatgtggctgccaggttatttaatttgactaaaagtgatgtgtgataattgtgtttatttaagattttgttcagaatgtttttaaaaaggtcactatgttacttttgcattatatatagtatgactgtaaaattaacttatctagaagaattacttgtatacactaaaagttttggagacttttgagattagatgcaaaagctattttctctctcagttcaaagaaaacaattcattgttattcattccatttcatcttacctgatgttttatttttgaaaaaaatgtttaatgtgatagttactgatttttagttttggtacatttgaaatactaaagactgacttgcacacaatagctgctgctgtttgctcactctgccattgaagcctggaaatggcccctccaggccgggtgtggtggctgacgactgtaatcccagcactttgggaggccgaggcaggtggttcacgaggtcaggagttcaagaccagcctgaccaacgtggtgaaaccctgtctctacaaaaaatacaaaaatttgcctggtgtggtggcgcgtgcccgtaatcccagctatgcaggagcctgaggcaggagaatgtcttgaatccgggaggaggaggttgcagtgagctaagatggcgtcactgctctccagcctgggtgatagagcaagactctgtctcaaaaaaaaaaaaaaaaaaccaaaagaaaaaaaaagaaagagcccctcggcactagagcccaaggtctaggcctcccctcctccctgccatgtaaactcctctttgacagaaattacttagccatggtattttcttccacgcttcttatactcccatcctcacgcttatttcagctgtggatgactttatcttttcaggagcccactcattcatttagcaaacatcaaacacataatatgtgtcaggctctattctaggtgctagggtacagtggtgaacaaaatggacaaacgtccatatcctaattgaggccgtattgtgctagggaaagaaacaataaataatttttaaaaagtaaaatacaacacaacattgaaaaagaagagcaaggctgggtgcggtggctcacgcctgtaatcccaacactttgggaggccgagatgagcggatcacgaggtcaggagtttgagaccagcctggccaacatggtgaaacccagtctctactaaaaatacaaaaaaaaattagatgggcgtggtggcgggcacctatagtctcagctacttgggaggctgaggcaggagaatcgcttgaacccgggaggcagaggttgctgtgagctgagattgtgccactgcactccagcctgggtgacacagtaagactccatctcaaaaaaaaaaaagaagaacaaagttgaaggactcgcatttcctaattttaaaacttaactacaaatatacagtaatcaaaatagtgtggtattgatgtaagaatagacatagagatcaatggaatagaattgaaagtccagaaataaacccgaacatctgtggccaattgatttttgacaaggatttcaagaccattcaatggaaaacagtccagttctttattcagtggagaacaatgtcttcaacaaatggtgctggggcaactacacagccaaatgcaaaataataaagttagatccctacctcacactagatataaaagttgactgaaaatgatcaataacctaaacataagagctaaaaccataaacttttagaagaaaacattggtaaatatttataaccttgaatttggcaatagattcttaggataccagaaacatgaataacaaaagaaaaagatttcatcaaaattaaaaacttgcatgcatcaaatgacataatgaaaataaaaagacaacatacagaaaaggaaagaatatttgcaaatcatgtatctcagggtctatatatccacaatatgtaaggaacttttaacaatgcaacaacaaaaatacacacaacccaattttaaagtgggcaagggacttgaatagatatttttccaaagaagacatacaaatggacagcaaatttgctcagtatcatgaggcattagagaaatgcaaatcaaaaccacagtggaccgggcacagtggctcatgcctgtaatcccagcactttgggaggccgaggcagggagatcatttgaggctaggagttcaagaccagcctggccaacatggcaaaacctcgtctgtactaaaaatacaaaaattagcggagcatggtggcacgtgcctgtagtctcagctacttgggaggctgaggcaggagaatcacttgaacctgggaggcggaggttgcagtgagctgagatcgcaccattgcactccagcctgggtgacagagcaagactctgtctcaaaaaaaaaaaaaaggcccaaaaaacaaaaaagaagccaaacccacagtgatatatcactacatatctactaagatgctataataaaaacagaaacagtgaaaaataacaagtgtcagtgaggatgtagagaaattggaattttcatacgtttctgatgggaatgtgaagtggttcagatgatgtggaaaatagtgtggcagtctctcaaaaagttaaaagtaaaattactgtatgacccagcaattccactcctaggtatatgctcgaaagaactgaaaacagctactcaaacagatacttttgcacaaatgtttatagcagcactattcacaataacctaaaggtggaatatggactatatctatcaattgtttatacacacacaaacacacacatatatgattcatcacacatagtttatggtttcatttatgtgaacaattcagaataggtaaatctataaagacagaatgcagattggtggttgccagggtcgatggggagggaagaataggaaaaaactgctgaatgtgtatagggttctattttggagtgatcaaaatgttttggaactaggtaaaggtgatggttacataacactgtgattgtgaacatattaaatgccactgaattgttcattttaaaatgggtgattttatgttacgtgcatttcactttaataatttttttaaaataagtaaaataatttacatttatgtgtgtgtgtgtgtgtgtgtgtgtgtgtgtgtgtgtgtgtgtagtcataatgatagttttagtggtaagtcctttcgggaaaaataaatcaggaaaggttgatagtaaggtaggggtggtgggggtttgcagtttaaaataagatagtcggccaagcgggtggctcatgcctgtaatcccagcgttttgagaagctgaggtgggtggatcacgaggtcaggagttcaagaccagcctgaccaacatggtgaaaccccatctctactaaaaatacaaaaattagctgggtgtggtggcatgcgcctgtaatcccagctactcaggaggctgaggcaggagaatcacttgaacctgggaggtggaggttgcagtgagcagagatcacgccacggcactccagcctggatgacagagtaagactccatctcacaaaataaaaataaaaataaaataagatagggaaggcttcactaagatatttgagtaaagtcccaaagcagatgagggcagcagccatgtgtatactaacatgaagaacgttggaaaaacagtaagtgctttgaaatagttgcatacttggtatgtttgagggaaagtaaggaggcatttgtggcaggagtagagagagcaagggggagagtagaaggaaaagaaggcaggaaggtaacggattcatgctcaagcaggatcattctaatatgccaccagtactgagaagtagtggtgtaggaccttgcaggccattgtaaggcttctggcttttacttagagtgaatcaaacctttggagagattggagcagggaaagattgtgacctgacttatgttttaattgggccaacatggctgtggtgttatgaatagagggactagtgtaaagcagggagactatagaaggctactttaataattcaatgaaatgttctgcttctgcttttcacatactacacaatctcatccaaactagtttccttttcccctcatatgctgataaatttaggattccatccttcagttcagcctcttctttgagctccagaccctgaacccacctaccaactgaattccattttgatattgtgcttcccccaactctctatccagctcactacctcagactcagtaaatccaagatggatgtctttgcatctgtgttacccccgacttcatttagttcctcctgaatttgtcattttcatgaatggcatgctcaggtgcccaagaaatctggactcttcctactttattgattcctagtcaatagtcaagattttgccatattctacatactttttcatgtaaattttaaaatcaccctatcaacatatacaaaaaagtactgctaggaatttggtcaaaatggcatggaatctgtagattgatttggggagaactgaaatcctaacattattgattttgcacatccatgaacatggtatatttcttcatttaatttctttctgcagtgttttgcagctgtcattttcgagttctccctccaccgccccacctttttttggttaaatttatttctaagtgttttatggtttttgagctattgtaaatgttttcactttttaattttccatttgttttctgctggtaaataggaatgtaattgtttttgtacatttatcttgtatcctgcaattgctaaattcactaattagtttcaacagttttttcaatttttttttggtagatttctttaggatttccttactttgttctttctgttgcctgtgaatacagaaaatttttcatttctaatctttatgcttgtatttggttttgtttgtttgctttatcgcactggctaggacatccatacaatcatgaatagcagtggtgagagtagatttctgtactttgtttctagtcttaggagaagtattcagtatttcaccactaattattatgttagctataggttgtagttaccctgtacagattgtggaagtttccttctatttctagtttggtgagaattaataattttttaaaactcatgaatgggtattgaatagtgtcaaatgtttttttctgcatctattaacatgatagtatggcatttctcctttattttgttagtatggtgaaacatgctaatttattttcaaatttaataccagttttgcatttctgtgataaacttcatttggtcaagatgtgtgttagtcctttctatactgctgggtgtgatttgctaatattttgttaaggatgtgtacatctgtttttctgaatactatttgtgttttctttttttttctaatatcttataagatttttgcatcagggtcatgctagcttcataaaattatttgggaactgtttgctcctttgtattcttaagagtaggtgtataatttcttctttaaatgtttgatagagctctccagtgaaaccatgtgggcctggtgatttttcctgggaaagttttaaattgtgaattcaatttctttaatatatttaaagcagttcaaattttcatctttctgtgtagaccaactatgttacctacccctaataagggtaacccacacccttattaagacataggacatttcggccgggtgcagtggctcactcctgtaatcccagcactttgggaggccgaggcgggcggatcacgaggtcaggaggttgagaccatcctggctaacacggtgaaaccctgtctctaataaaaatacaaaaaaaattagctgggtgtggtggcgggcgcctgtagtcctagctactcgggaggctgaggcaggagaatggcgtgaacctgggaggcagagcttgcagtgagccaagatcgcaccattgcactccagcctgggcaacagagcgagactctgtctcaaaaaaaaaaaaaaaaaaaaaaaaagacacaggacatttctgttaccttggaatgtttccactaatgaactttgggtaaatagctccttgtaagtcatgaactgcatgaattgagcaattataactgaaaatgcaaatgcattataccttttttacccaatcaagtaagagttttcattagcagttttcaaaaaaaataggaatttttctacattttgtttttatgaaaagcaggttatcaaattctgcattattattttttatttaggaagatgttaactttctaatttcttctgaagatatcccacattttgtcagttgatgccagttttcaaatagacagtcatgaatatattgtagatttcatgtactgtgggagagtctcttgtatagcaggttgagcttaagcagaaagggctttgccacagtatggaacactatgaagcaggtaccaagaatgaagtagatttatgtcctggtaacagaaaatatcctcaagcaagttgcagaatgcttgaatctctttaaaaattcaaactaatgctatattttttgtaaggactttaatatgtaaagatatgcagagtaaaatatctataaataagtccaagctaatttgagtagtcacatcaaagagtgcataagggtttgggaactgtgggtgatggtcagatgagatttaacctgattatagaagtttgaattttcataataatagcacattaccatagaacttatgtaattagaactgtgaaggcctgtagcagatttactgatgactagagggaaaatgcctccagattttgtttttgtttttgttttagcagttactttgaagctgttgaaaaccagctcataaaatctacacatagagtgttctaaatctgttttttttttcaaattatggcataagaaagtattgcaagtaaagttcaaatgcaacttaggattcaaataaaagttggatattactcttgctacctcaaaactttaaaaacattaagtacttaataacatgaaaatgcttggagtataccattcattgaaataggcagaatataagatatatttataaatgaattatttaaaaaagtttatttagaaaaaatacacaaaaatgttggtagtgattggtttctctgggtggataaacagtggttatttgagccgccttttttaggaacttttccatatttttctattttttttggcttgtttttcattcacacaaatttccgagaagggaagagaagaaagaaaattcttagcatttacaagcatgctacagggaattctggtgctttttaacaggagaatggtaggatcagatatgcattgtagaagtctggcaatttgtagaagagatttgggaggtctggagggagatcaagaagatggagaggaagagttgtttttgaaggatgtttagtaaataaaaaatcggccgggtctggtgtctcgcacctgtaagcccaacactttgggaggctgaggtgggtggattgcttgagccaaggagttcgaaaccagcctaggaaacataaagagaccttgtctctacaataaatccaaaaattagctgggcatggtggcatgtgcctatagtcctagctactcgggaggctgaggtgggaggactgcttgagcccgggaggcagaggttgcagtgagccgagatcgtgccactgcacttcagcctgggcaaaagagtgagaccctgtctcaaataaataaataaataaataaataaataaataaataaatactcaacaggattggcaacagggtgggtgggagtagaatgaaagaataagggagaggttaattttccgccttttacatttgtcattttaaaactaagtcttttcaaatctattttgtaactgcacattacttctgatttaggtaacataaataggaaactgcagttcttctctttctgtgacaataacttaagtctctgcttaggtggaaatcccaatttcaggctgacttggaaaatactatttatttcaagtagattaatatctgaatataaaaactatgatgcaaatccttctaatgtcttcaacctgagtaacttcactgggtaacagtccctaggccaacttaaaaaaaaagcactgaatttcctatgcctaggattcaaaacttaatctgtgtgcagccattagcaaagcaatttctctccaaatattgaaattcacattgaacacatctttctctgaaattctgcttaatttctatttaacaattacccaaatctaaaagatcttgtgattattgagcagaatcaggatttatgctatatcagtggttctctacagagggtgacaggagatatttgacaatgtctggagacatttttggttgtcatcacaatttgatgggaatgtgtgctactggcatctataggtggaggccaaggatgctgctaaacaccctgtaacgcacaggacagcccctccacacaaatctagcctcagatgtcagtagttgagaaacctatgctagttgaggttgagaaacctatgctagatctttagatcgatacagagatgcaagtgagctcatgttttagtaagagactaaggggtttcctcttagtcatgtctaagaggttaggtatatccacatcacagcgttgtttacagttaaggaaatcattggtacatatgggtatagaaatttgggactcattagaaaaggggtgacctgggaacactgaggaagatgtagatttgaggatttagggttgatggagtggtggaggaatctaactggttaatctaacctaaagctgacaggtgctggctggaactgactgccggagattgaggtgagtgctaagtaaataggcagtttggagcccctcactaccaaacaattcgggaaaactgatagccctccttgccatggaagcgaaggagagtgtgacataagggaatttgtcataaatcatggccaagtagtgttcttggggtgtgagatgtttctacaagggctagttcactgctgtctttttcatggcatcatttgcatttctcaatgagatgtcacttgggggctaaaggaaccacaggctccaggggaggtggggttctccactgggacctcaatcagcatgatgccacacaggataagtgacatatgataagtacaaagcatcgggcaggggatcaggaggactccatggaggtgactggacctaaaagaggggagaggaagaggtcaggaagcagaaagacaggaatgaagatacggagccaggaaagagtttctagtctataacgaataatttcattcttgggctactcattaattgttccatgtgttagttttgtaactttatgagttgttgtattagtctgttctcacactgctggtaaagacataccagagactgagtaatttataaagaaaaagaggcttaatggactcgtagttctgcatggctgaagaggcctcacaatcatggtggaaggcaaaatgcatgtctttcatggcggcagacaagagagaatgagagccaagcgaaagaggaaaccccttagaaaaccgtcagatctcatgagactcactaccaagagaacagtatgggggaaactgccctcatgattcaattatctctcaccaggtccctctcacaacatgtgggaattatgggagctccaattcaagatgagatttgggtggggatgcagccaaaccgtatcaaaccatagtggttgcccaataaatactgttcttaacattcttattcattgttctaatgctattctagttatggattaaaattcttattttttcttaatctttgaacttttgttgaacttatatctgataagaaatattgttaacagcagggaccatgttatataaaattgtctaggattttgttttaaattaaaatattttattttgtaatatttgatacattcaaaagaatatgtagcacacttataaaaattatggaatattataataatacaacatataatataatatgacagtataacatactaatgccacatcttcttgttgggctactcccctgccttctgctcagaagcattaatttctgaattctgtgtttttattgtcttgatttttaaaatgaaatttaatcacatatgtatctctaggatatttagtttttatttctttttaaactaaatgatttcatactctatgtcatcttctaggctctgctgtttttcactaaatgttatatttctaagattaatctttgtggatatcattaatatgtttttattactatatgaaattcaattgtaagattatttcgtcatttattcatcctctagtcgatggatatttgggttatttccagatttttgcttttttgagtaatactgctatgaatattctagtatgtgcagtggtttctttatgtgtatatatatatatatttatatttatatttatatatatatctgtgaagggggaaatatatatatatatgtacaatagtttctttagggaagtggctttcaatttttttaaaaaaactatgatccagtaggacatatacacaaatacctctattcatctcttcaaaaacttcaagaagtagaatttttccccactatcaacaatgactgataaaatctagtccattttttaaaatgctggttgagatccaatgaattggtttcattaatcatttctacctgatgtttggaaactagcctaggttatatactttgttgtggaattgctatgtcttataatatacaaatttcaactttacaagataatggcaaattatttccacagttcttgaaccaactatttctataaattcttattattcacattcttatcaacacttgccaatccagaccaaatttaagttttctacaagaagtctattaagttagtaaattatatgaagatattttaatgatttttacctatgttctaattttataactaaacatttctggcccaaaaaagtgccagtgtttctagaagactggagaatgctgagttgtccttcattctgtttgagattttgcatagaatgtcttcacattttctcttcttaaaagtacttcttgcttgttattgtctttgctttgctgctcaagattacagctattgatctatctcagttgtggctttgtgctggattattttaaagttaagcatcactgataagttatctacttagtaaaacttaaacctactgagaaaacagctccgtcgttcctgatgtagtccgatccatttcactctcagaagactggaatgtttatggacagttggtgatgtcaactttaaaggacaaatgatggttaaatttatacaagcagatggtttagtggaaaattttggttgagtttgtcaaaatgtggtttttaatatctgaagcgacacaggaagaacttagtgtagttagtttgtgggctttgccataatttttaaggttgagaatgtctttcctgatactttctttgcacttgctagggtggtgctttgataggctggtgtatcctcttttggcttttgctgtgtttcatgactccttagcacataaaaatctacttgttcatctacattcagtgactaaattgacataggaagaatttttgctctgcacgatgaccaacttcattattcatgggatatgtatcctccgtgactttgtaaggttctttccttaatctgtctgacctgagtggctccagtttaagttttcaagtcagtggtacaatgaagcctagtcacccattaataccattttatgtacatttcaacaatactaccatcgtcattgacaaaaatatttcaacatggtcttgtactctgtcattttctgtgtgtttttctggcttgagaaggtacagagctcattacaatggatgagctcacccttactccaggacagattcagtttttggttttgttttgtttttaatttctgaaattctttcccaaccttaagaatctaaactgcaaatctaaagaagtgcttgtttgtgtggtgggactgtagcatttaacagatgccagatggaaggagcagacgaatgatagtgcagcaggattagggcctaattgttgtcatttcctcagttacaccataactgcattttcagacttccacctggagaaaaatatagcaagttggattagcttgagcttatgccctaggatccatccagctctgacctagggaaccgggaagctgtcctgtgggtgccagttacagattctggggcttaccaggccgggtgtaatgaagaaaatacattacttctggcctggcccagagttttagactctctacaatgagatcactctgttgccacctatgtttaaataaaaacaatataaaacaaagcaacacatctcccccttcacctagtaaaccatttagtaaggccagaaatagcacctccccaatattttattacatgtttaagactctgaatatttgaagcaggctaatggcatcatgacttagagttcttattccttaggcaatggagattttgaatctgggaaagtatagctcatgccacagcacccagtgcatgatagagtctcaataaatacttgttgactgaatcaaagaatgaatgaaagtgttgagaagtatatcaggatagcttccgcaaggaggttttaaagggctttttagaaataatctctactcctaagcacaaggaaagatagtaacatgtttttagtaggactaggcaaaatggccattcattcttcttaggatttgtatttctcagaggaccaaagcgggaaggaggaaaagtgaaaggtcatttgttgggtttaccaccatgaactacaggctggagtgaagttaatacattttctaataagccccataaaagtggcttgtgagttagcatatgagagattctgaatgaaaaatagggaacgttttgaagaacatgctctgtagtctgtgtggtgtgtctgtgatgcactgttcctgctctgccaccagctcacattcctcctgttttggctgaactgcattgattttgagagagatggggtcatgggggtgtggagaggggagagtggggggtgagagaaagggagagagggtacgagtgcatacatgtgtggttggaggggagctcatttctctggttcccaagcaggcatcagagtttaaaaagggcatccagactctcctgaggtgactttacaacaatgagaagaaagttgaatgtgcctagttacctgcaaaaccagttttaaacacctactttaaacaaagagaaatatctcttccaaattcaagctaagctgttccacctgggtattgtctgatatttagaaaaatacaatttatctgttttctgaaggacatgctgggaacattgaaaaaaactggttcattgactacgtcaataaaatattacttgctgcattgtttaccaaaaagctggaacagttgtataattcttaaagttttaaggatgcttggtgttttgatgggcaaagagttataaagcgtcctcaaaactaatttgatttgttttacagtttgcttaacagtgatattcttcagtgcccttccagaacatgtagatgaaaagataagcacaatgcattttaaaagttagagttatattttggaagtagaaatgtatattgagatctcttaattttactaaagggtatagattttttctgaccaaaaaattgaatatgcctttagaaaacaaaaaagaaagaaaaaaaattagatatgcctttcgaagtaaaattagcagttacacagcaagagcttggtgtaaatgttcattgaataaaaggatatttattcctgaaaaagctgtctgtgaatcagatttttgtaaattgaatcatatttttacatgtattatgacttatttcataagacaaataatctttcctaagtttatatttttgataaacttagattttcatgggtcagaattgctggagtaaggacaccttttgatgttgcataagatctggggtattctttttgaggttgccaaagtataagaggtttggttctttttaagggcaatcattatttaccagatgataaacaattcaataaaaatagatttctaaggatctacattttgtaattgataatcattcatgctaaaatagttggccttgattctgttctccttgagaatgtgggatgttttataaacacattaagagttacaaatagagtagggcaggaagaattgatttcattgtcagtaatgtaatgatataattttgtgtatacataaaatttcaatcaaagcagtctaataaaaataaaaaagcctgttagagggagatctatattaagaattgcctttaagtaacatgggctgctttgttctatgagttaatggcccattttgcttctgttttctcatttgtctgctgagttcttgcgatttaagtagagttttaggacaagtaggagctcgtgatgaatggattgtccctgttagaaaggtggtcactacctgctgtctaactggaaagtgcaagacttatcttgagcatgaaagaaacatggagccacattttaaagtaaatagcacacaactttctgatgaatacaggaaacccagtgttcctgtggtcttaacaagagctggaccagaatatgtgggcaccccagagacactaatcatattatactgcttcaaagcgttttgaggaagggtgggaaaaaatgaatctttgctaataaaacgtttattcagaaataaattcaattatgatatttcttctgaagcagaatcagtgtttggaaagacagtgggcaacctgtttcccactcttctgcagtcctcttctcaatttcctattgtgatttttctgacttgggaggcatttttcagttgatataaaatgcaaactgaaatgtcttccacccttcttctcctctggccatgttccctttccaaaggcaacaaatgtggtcagtttcatgtgcgtcctctctggcacatgaaagtgttttcccttcctctctaagctattatattaaaagggttcaaaggacgatcaagttaatcacatcctttagtaaagcacacaaacactctgtattcccatttcagaatgtctccccacttcctcacttccaggtgccaagtgtcatgcacatcacaaaacatatttaggagtgttgttttttcccacttgagagcaccgcctacttccatcataacatgatcagtgtatgatttgggagttgattgcagtgatatttttgcatctgttatacataagtgcccaaatacttgcctggctcttctgcctctttatccagctctggtcaccttctgtatcataaaggtgaaaagagcccagcagtaagctgtattagtccattctcacactgctataaagaaacagcctgagactgggtactttataaacaaaagaggtttaattgacttccagtttcacatagctggggagcctcgaaagggaaatttacaatcatcgcagaaggtgaaggggaagcaaggcacatgttacatggcagcaggagggaaagagagaagggggaagtgcgagacacttaccaaacaagcagatctcatgagaactcattatcacgagaacagcaagaggggaatcttcccccatgatctaatcacctcccaccagatccctccctcgacaagtggggactacagttcaagatgagatttgggcgggggcacagagccaaaccataaccgtaaccaactctggttgcagggtgaacaccctgaaacagcagtgctcatttattctgagagtggagctcctttttctgaaactcctcagagtgggacccttgcagtggctttgttgtcagcccttctggcagacgggcccctgttggagtttgccttttgttttctatgcagaacacacctctgcttccccacactgtggctacttcctaccttttccttgctcctcaaatctgtcacccctcctgctgcctgtctcactaacttctctgcaaccttggagttttcagagggaacaccctcatcatcctgtgaccagatagacaaacctgcctgtatctgctcccgtttactcctcttcccttctgttgtcccacttctatcttttgccacatgcatctctcctttttatggataatcagtaaaatgagtaagattctctccagaagcctcatctttaaacaaaacacaccacactgaccttaccttcctagtaactaccacctctgccaggtctcccagctctctcatctgtccttctacattgttttctacttgctcccccatctgatctgttctccatataagcagctaggacgatcacttaaaaatgatcaagtcggccaggcgcaatggctcacacctgtaatcccagcactttgggaggccgaagcgagcggaccacctgaggtcaggagttcgagaccagcctagctaacttgacgaaaccccatctctactaaaaatacaaaaattatctgggtgtggtggtgtacacctgtaatcccagctactcaggacactgaggcaggagcatcacttgaacccaggaagtggaggttgcaatgagctgagatcgcgccactgcactccagcctgggagacagaggaagactccatctcaaaaaaaaaaaaaaaaaaaaaaaaaagatctagtcagatcatttaacttctttgcttttcaaacccattcaaactggacatggtggctcatgcctataatcccagcactttgagaggctgaggcaggaagatcacttgagtccaggagttcaagaccagcctggacctcgtctctacaaaaaaaaaaaaaaaaaaaaaaacccattcaaaggctcccctttgcactttagataaaacccattttccatatgctgctttccagctccagcaggacactcgtgtcttctcttgcctcacttccagccactcacacccttgcccactcttccttggccacagtttttcctccagttacccaaatgcatggaattctctccacccctgtgccaccctcttggcatttttctctggaggtctcactctacagcccctggagtggccgcactttctcgtcctcttgatctcattgtcacctcctcaaggggtcttcaccagaagtccaagcaggtccctggccccacaatcatgtttgttcctgcataagatttcatggcttgttaatatttacatgtttcatatccagacagtttctaagccctgtaagggcaagggccatgtctgctttgctccccactgggcagggcctgacacatgataggcattcatatcagggccatttgctgagatatgtgaatgagtgaatggaggctgacatgcagctcagctcggatttgtcctttcctttaggagacagagccaacctctctgttgtgcttcatgcccctttagagccacaacgttttggagattgaggagatcttggagggcttctctctcacatatccgccatttgggctccatctcccatcctcctgcatttcagtacagctcaggcccagccttggattcagggggtcttttgctgtccgtctcgccttgtcaggggacgcacccatgtggctttcctcccatgtcctttgggagcgggattatggtgcagtggtttaggatgtatggagccaaactgcaggggtctgaatcctggcttactagtggtgtgacctttacaagatacttaatctctgtgttccttggtttcctcacatgtcaagtggggttaatgagcacatgcagctgtgacagtgattcggtgagtaaatgtacttaaggcacttatcatgaagatagtcaatatgcgttggccatctgcctctctcccctctacgttcttcttatgatctccatgcactgtaatccttccaggctcttcccagtacccgcatagtgagaacagtcagctactctctacagtctctttagcttagtcctcttcttactcttactttctccttttccccctttttctaattcagtgttgttgtttttttaacctttttggggtcacaggctcttttgagaatttaaagaagaatacctatggactgttgccttagaaaaactcagtatttgtgcaatcacccaaaatgagcatacaattcaaatgtccacagatgccttggaatctctctacggccccctagatagagctcccctgtctctgttgtcttctttggtgctgtggaccaaaggtattccacccagaaaactagaactgacccttcatggatatttaggaaacctcagaatacagctagaaaagtctccttccagaaggtgaaattatgataccatttctatgtgtatccaactgcatggtactaaacgggtatatgcataaagtgattatgtcttataatacagcttatgattgctactcatttgggacatatgggaatgccaggctactttaagtgaggacaaatttgaattaaatatacgtgtgtgtgtgtgtgtgtgttttaagcccagtttcttctcaagttgtacggtaataagacatgatatatgtgtgccaatggtgataataacagccagctgttttctagatagaagtccttttggacatagttttatacttgtgtgtaaagtataaataagttattataaagtaaaataagcatttattatggctgtattaattaccagtgtacaaaaagtgctgcagaaatagtctagataacaatatgtttcttggaggggattaaatgttccttcagcaaatgtgttcactttctaaattggttagtaaactgtcttatagataccaaggtatacttaatgctggtcatggattagcgggtcaaaattgataagtttgaaaaattaaaagacaaaaacaaataaggaaatcatgatgttttatcggggtgattgtttctggactaggccctcgcagaacaaacaagtgctccctgaccccctgggctgagcgcattgtgcaccctggtaggtgatggaggccttggccacattgacccaaaagcagtgcccgtgaaggattgctcaaaggttccatgtgcccagggcttaggaatgctccatctcaaacggtgtttttaaaattgtattttcttcaggattaaaatcaccaactgaaccttccaaggagaccaactgagtggaaatcatcttcagtaactgctaatgggagctggatttaaaaccgtcaacttaaagtaaaaaagcttatgtctcctgtactgttacccagccgggtaaattgttttttagtgtggaatcatgtacacttaaatcatggtgtatgcatgtggtcagcgctgcttttcttttaagtgggcttgtttatttaagagactcgaaaatgagaagttgttttcttactcagttggggtttattgtaaaactcaatgccagaaaaagaaaaaagtactgtttttatgctgcaagtgtgtgaagtgtgtcctttccaaagaaaggacagtcatggtgttttttctctctgcccaaagaaggaaagctgtaagggccagcaggaggctttgtgggggatctgggcttatgaacgctaatcacgcactgaccaatggtttcaaacacaggaacgcccagtatatgcttttactcttattcctttgcagaaattaatactaaaatgaaacaagtagctggagagcaaagtgggaattggttcatgttggtagatgatatttgttattaacagggccagtttgatagcggtgtcagagttgttgttttgccctgctctgtgctgtgaagtgtcatgagtgaaggtcgcgctcagactactacaagtagtcccagtagcatcaaaacagctgagcaagtcttgagatcccatgtgacacatccagccaacagccatggagtcctggacccatcgctcagaaacacccttccctggagactgagccttgtcttgatctgcaaatgaggagggggtgaagtccagagagacagcatgacgtgcctaagagcacacagttgatctgtgacagggatacacgattttcttacaaaagtgagactataccacaccaaaaaatcttggaaaattatcctaatccaccacagtttatatttttattttttgttatttttattattttttgagacagggtctctctctgttgcccaggctggagtgcagtggcacaatcatgactcactgcaacttccgattcacaggctcaagccgtcctcctacctcagcctttcaagaagctgggactacatgtacccgccaccacgcccaattaacttttgtattttttgtagagatggtgtttcaccatgttgtccaggctggtctcaaattcctgagctcaagccatctgcctgccaaagcctcccaaagtgctgggattacaggcgagagccactgtgcctggccagtttatttatttatttttaactgtgatttaaatccttttaagtgcagcccagttatcctctcaggaatctttccagactttccgccccctcaggttgggctcacttattgtttgtttcattcttctttgcactttttggaaatgtagtaactgagagaaatattaatcgcccctcctgtttttgcaaccagtttttttttcagtgaatgctctgagggtgctctgttttgttatggtgaacctgggccgtggagttatcaggagatgagagtaggttagagcttagagtctgtgggcatttcagttctctgacaatggaaagctgttcggagccaggttgacacaactgaataaacttacactgttaatgtcagggcgatgaccacctggagacaaacagggaggccctttgttctactagtggctaaaacattataggaatgagaatgaataacctttatgaaccctaaagtgcactgcctggacaaatagaaacaacctagacaaggaaatggggtctctgccatccaggccgtagtgtagtggtgcagtcatagctcactgcagagtcaaacctctgggctcaagtgatcctcccacctcagcctcctgagtagctggaacccaggctgtaagccaccacacctggcatgattcattttttacaattaatttttctattaaaaatatgccaagcatacaaacaagcatagaaaataatattttgaacatctgtatacccaccagtcagcctaattaaaatcttttcgatctatttctagcctacctggaggccactgttatgaattgggtgtttatcactcttgaagttctaagtttaactctttggggcctccctcaatgcaagggcctgtgtttaatgggacaggagtggtatcttgcagcagtaaaatcacagttttggaactgtcgtgagaccactgtaatgatttgaaatgtgtcagtgagatcggtctgcagagacccgagatgtttcagaccctagattcatgactagttgggaattccccaagggatgagaaagtgtggtggccactgaaggtcactcatcaagggaaacctcagacagacagtttgaagaaaaatgtatggtttaggagtagtgcttttcaaacttttttattgtaacccaacttaacaagtaaattttccattgtaaccctggacacatacaccgcacacacatacacacacacacacacacacacacacacacacagcacatacctgtgaatgaaaatttttcatgaaatgattattattatacttatttttcgtcagctgctctgcaataaagtctgttttgttttgttgtttgtgcaaaagctgttttgttccaattcattgatttcacatgccattggtaaatagaaacccacagtttaaaaaaacgaaccaaacaaaacctggtttagggaactgttgtttcatggagcaaaagtttctaaaaggtgtatttggtttaactcgctgagtgtttttataaaaagcttttctctatgactgacctcagcttaaagatctataccacaacttactaataatgagttccatgtaaaactaagcagaattcacaactcttttggggttcaggttattctatcatgagacttctccttaaagcttctaaccctcttcagccattgctttaaggcagcctgactagattaagtaaacagaacttgaacacaatgacttaactatactttataaattcatgattgttaagccacaaaatcaacctttccaaataaaactgagtgtaagtcaaactgccaagcgaaaagagcagctatggagctctcaactctcccttttgtcatagtttatctctgtacaatgccagataaagcccagatgaggaataaagtgatgtgactattgctttatacttattaaatctcatccgttattgtgggaccatgctgccatcctcctcacctgaggtgcccgataatgatcaccctagcggggggttataaggcacctttgttcgaaagaagtttatagaattggactcagaaaggtacagcttgccctccagggaagcaaaggagaaaattatatttaatgcatattaaacaaacaattgttggagattataagctacatcgattccaagatcccaaaatacttgagtcagcttactccaaaatgttaccagccagccactttaaacattaatgaggtagctggtttctaaaatctggaaggaggaggaggttttgtttaagccaactatttcacagaagaggaaatacagttcgacctcaggaaatttaaatgagactgctgaataactgggaaagaacatctcctgtggatgacagggcaaagaagaattaagctgattttaggccaaataacaaatgtgacagctgtgcttttttgtgtatgtattggtgtgtgatagtgtataatttctagaaaagcagttctcatgcatttgggtcttgaaaatttccacttttaaaaattattgagaactccaaagaactcttgcttctgtaggctgtatctatcaatttttaccattttaaaaattgaaactaagaaattaaaaaaatattgattgaatcattaaaaaaactgtattaacataaaatatttttatttaaaacattgttttcaaaaaagttattgagaagagtattattgttttatattactgcaaatctatttaatacttggcttaataaatggcacctagattgtcatcttttctccatatactctattgtgttatgttgttttggttgaagtatgtgaagcgaagttagttcacacaaataagtaattggaaaagagagaacctcatagtccccttaaaaggatctcaggggactcccagggatccttggggcacactttgagagccactgtcctgaaaagtagtttggaagactatgttaagaatggctgtccaggagtggtgagattattcacgattctttttttcttttcttttcattagtatttattttctacaagaagatggattgcttgtgcaaactaaaaatgagaaagaaagaacatactcatgttgagggcagattatggaggccctggaaaaacccaggcagaggagtttacacttgggagaccaaggagccactgtcatttcttaaatgggaaaatgataagagctgtgtttgggagtaagtgaattcgaattgaaagagagaaagagagatgctacttcagagaagtggtgtggtgagtcagacctcaggtgttggcagaaatggagagaaaggacaaactccaaagactttgagggcagaatgacctgagacctggatataggaaatacaggagagggcagagtcaaagacaacagttttaaaattaaaacatttgaagaatgttttttcccttctatccaactttggggcctggttctgttgctcaggctggagtgcagtggcgcagccttgacctcctgggctcgagccattcacccacttgagtagctgggactgtaggtgtagattgcctctttctatccaacttcaactttttctgaatgttactccgattaagctaattgaagtcttgtcgtgttttccagagttggccaccctgttcaagggcttaggagaaagtcaacacacttcgcaacttgaattggtcccagctgctcccagaagaacgggcgggttggtccctatgccacccctggagagctactcgccgcccactttgccgtgaagggctgtgcggttcccgtgcgcgccggagcctgctgtggcctcttatgcactccaccacccccatcagctccctcttctccttcaccagccccgcagtgaagagactgctaggctggaagcaaggagatgaagaggaaaagtgggcagagaaggcagtggactctctagtgaagaagttaaagaagaagaagggagccatggacgagctggagagggctctcagctgcccggggcagcccagcaaatgcgtcacgattccccgctccctggacgggcggctgcaggtgtcccaccgcaagggcctgccccatgtgatttactgtcgcgtgtggcgctggccggatctgcagtcccaccacgagctgaagccgctggagtgctgtgagttcccatttggctccaagcagaaagaagtgtgcattaacccttaccactaccgccgggtggagactccaggtgggtcgtctttacgacgtcaaggtttattttcagagtgaaggtcgtgtgccccattgatggagaatgatggggcaccagcagacagggacctctcccaaaagagagagagagaagagaggagagggaggttcagttttgagggactcgtccaaaattttgtttcccggaatgaggcagctgtccaatcaaagaaagttcccatgaaaacgatattcctgcctggaatgccacaggaacactcaatccaaagagaatcgcagtaaaaccctgttatagccagtgtgaaggaatgaagataaactagtcaggaaaatctagaaagaagatattttcatttgatttcattatgctggtaagctttgtgtgattttgaaaatgaggcagatggctaatcggagaaaactgccataaaagttttattttgaggtatctgggacaagtcaacataatcttttaccagttcttggggtcctgaaaggttttaaaatggccttgataatgatgagctgtaaaaattaaacatcctcctccccccgccccaaacaactgaactgaactgtactaaactgaactaaggcagggtttttggctgctactttgttcaagttcaggtaagtagaagatatctcatgtctaggtctgaaaacagccaatgaaagagttgctggaaatcattccaggcagttatttttaaaaatggttttaagtacagacaggtatcacttaatgatggaaatacattctgagaaatgcatcagtaagtaatttcttccttgtgtgaacaccctggagtgtacttacacaaaccatgagcctgctacaccgttaggctatatggtgtagcctattgctcctaggctactaacctgcacagcatgctactgtactaaatactgtaggcaatcctaaccacaatggtattgaatgtatatgaacagatctaaacatagaagaggtacagcaaaagtacagtatcataatcttgggggaccactgtcttatattggtccctcaagcaaaacatgattacacagtgcatgattgtataggaaagtatctttctaaaacccttcacacccctgtgtgtgtgtgtgtgtgtatgtatattatatatatgtgtgtaagaaatatgtatatatttcctcctcctcttggagaagcctggtgtttgtctttgttccttcacactggctataacagggtttcactgtgattctcttagattgagtgtttctgtggcatttcacacaagaacacagttttaggagagctttctctctttggccatctgcctcatcccaggaaaccaaagcgctggcacattagctcagggaaattgcccatgtccagtgaagagatggtcctgtctacgtaggcaggttcacttaaccttaaaacagtatccaataagtgatttatgcccagcctacctcagtcttagctaagtgatccttcaagctcccagaacttaacatctacctgtgtgtggatgcctcccacagcccattcagggactgaggccctggctgagaaggtattagaaggttccacatgcttggcaaatctgatgcgtttcccctaaatcctggagcgagttgctttccacccttcttccctggttcattttgactcttttcgcttacttaaaaaaaaaagtcaataatgtctaagcttataacaaaaatgactggattccattttgtgtttcaaagatttgaattacattaagcatccaaaatatatccaaatggaaaaatgttcattaataaatcatttctgtcttcctgaataatgtagttgtaaaatttaacaacttgtaagaaatatcttgtaaaatgtacctggttttccttttgaatattcaaaagcctaattttaaagaactatttgacattttagtttttcatgtcttttgtttttttgtcttgctctgttggcaggccggtgtgcagtggcgcagtctctgctcactgcaaccgtcacctccccagttcaagcgattctcctgcctcagcctcctgagtagctgggactacaggcacgtgccaccatgcccagctactttttgtatttttagtagagacggggtttcaccatgttggccaggatggtctcgatctcttgacctcatgatccacctgcctcgtcctcccaaagtgctgggattacaggcatgagccaccatacctggcctttagtttttcatgttctgtaagattcttttaggaatgatagtgtgagtgttttacatatggtaaatatatttcattttatcataatttaggtgtgaatttccagaaggaaagatgggtaacgattatattaatttaaggtaatatttaagttacagaggtttttcttacttgtgtttttttaatagaaaaagtagattttatatctagttagctatccatatttaaagtaaatattttaggaataataaaaatgttaatgttaaacaagtttgctgagttcctatttatcataaagcttaagttttgcctttgaaatctcattttttagccatccattttagatacattgaaggctgcattcccattttcttttcattcacacatccacttcaataattgacttcagtgctttccaagttatgtgtggtgagggatcagtttttatttttttaatttccagtccttcaaacgaacacttttatagtacagacaaattactaggcaaatgaaattttaaaaagacttagaaaatataagcccaattttaaaaattatttaaacaagtgtaaactagaaactctgtcaaattgctgtgaaaagtttctaagtactaatttcttcacagactcgtacccaacagttggtgaagggtccccagtcctcagacacactttacctggcacagttctggtggaagccatgcaagactgttgttgtggtacatgatgattttactccatttggctggaggttatttcaggagtgtaatttcttttttatataaaatattcatattatatcaaaaccacatgactttttttaaaaagacagaagtgttttttttccagctctgctttgcatgcccatgtgccctgtaactccttccgctgtctccccccgtgtgacactgagatgtaaagatagcatggtgtttaaaagtggcataagataggcatgagtgtctgtaagcgcactgtcatatttacaagcagcagttgagatgtggaagtggaattaagtaattagggatagctgtgttgtgagtgaaagtatttaaaaatatgatcagtgcacatttaaggcaacggagccagtcaggtcaaataacaactaggatgaaactatcagttttctttgcaaacatccactggctttgattttacccagatggtaaaaatatattatcaagatagttgttatgataaagggaaatgtatcctttcttttctcttggtgcctcagatctacaggccatgaagaaatagaagtctctacattcagatggataggaggcattatatttttatcagtgttaggaatataccgtagatattttacattaaaactgaagtcacagagatgattcaaattcttcttcataaagaagtgagtgtttacttgaacatcgttaacattttgatgaagggtcattgacaaagaagccatacacattcgctgtgtcaactcctcacttcagactattcatgaggcacataatctttttttttcctgcatagttgtggaatatgaatacattaaggggaatttaatggtttatgatccatgtcactgtttgatggtgatgttgaatgtttgttctctggtgtcataaggcagcatacgtatacaatagcttagaaaaggggaagaaattatttgtttctctgccaccctcacctgtagcagttttagtttaaaaccttttatttacccttcttagtttattttctgtccatataactgaaaattattgtttgttaagaaagagatagatgtatggtgtcaaaggcagatggcagacttcggggttaatgtcattgttattgtaattgtctgtttattccaaaacatttacctttttttaagactttattttttagagcagttttagaacatttactttttatgagtttttattaatacttgcctgtggttgacaaatcagtggtgtgattagaaccaagatctgtcctatttatacccggagacaaactcttctaaataattcttgcttagttctttcatatttctctctattattactaagaattatgacagtaactctagataatatataatatgcttacatatctatttccaaatttatcaccttttagataatgtcattgactctctaccataaaagatgaggatttcactcacatacatacatacatacatatacatatatatatatgtatttttttttttttttttttttttttgggacggagtcttgctctgcccaggctggagtgcagtggtgcgatcttggctcactgcaagctccgcctcctgggttcacgccattctcctacctcagcccccccaagtagctgggactacaggcacccgcaaccacgcccggctaattttttgtatttttagtagagacggggtttcactgtgttagccaggatggtctcgatctcctgacctcgtgatccacctgccttggccttccaaagtgctgggattacaggtgtgagccaccatgcccagcctcactcacttatgttttcatcttcttccttcctcctcttctcatccttgatatctatattttagttcatagtttgtatttgtttttggttattccagtggtttccattgtggaattcgggggtaagaattatttgtcctcagaagggcattggtctgttgacttctagtagccagggttagagtgggaagttgaggtcggttgattctcatttctttgtaggtgactttgcggtgatcctctaggagcttttggaatattccagttatcccgcagtgtttgaaattcaagatggaaagactaggtctggatcttttcttcattaattgagctctgcacactctgtggctcttttcaacatgaagacgtaggtcctttgtagctctttgaggttttcctttgttatttcttagaccacttcccccttgtattttctttgcttccctgtctggaacttatgttggtcacagatggctcttcaacaacagttttggagtagctactttatgccaggcattgtaaccttctaggagtcggtaggacgtgagggcctgggcaaagcttgcccttaagaatttgaatttattctgaaattttgtgtataatcagaatcaagaacagtaacattctttttaaaaaatgaaacccagaaaagcatagtaaatgaacaaacatcatttatgttttgttattgctgcttattttatttttttgagacagagtttcactcttgtcacccaggctggagtgcaatggtatgatctcggctcactgcaacttccacctcccagattcaagcgattctcctgcctcagcctcctgaatagctgggattacaggtgcccgccaccacacccggctaattgttgtatttttaatagagacggggtttcaccacgttggctaggctggtctcaaactcctgatctcaggtgatctggctgcctcggcctctcaaagtgctggtattacaggcgtgagccactgtgccctgctgctgctcatcttttacttagtcacttttattattattcaccgtttgtgttttacttaataacttttaattactcaccttgaaatctttccattaaggacacatagaatgtttttatttcagtggcactactgaacctgaaattgagtctggtcatctaaataattcaacatgatctctgaaggaaaaatattctggggatcacttagggtttcattgcaagcaagagaaactgattttgccttgggggaaaaaaagacttatttggcagaattaaagaaagacgtaacaatcaggttgccagaaggccaggtattaggacagctctggtcatttccaaggtaggaataaagagcaggtctctttagagtgctgacactagaaagatccttctccaaatgcttttgtgaattatgacattctgcttaagattccggttacaaggagaagactgttaccttagcttactcacatgcttgcttcttaggtggagatggggacttaatcgacagttttatgatgagcacaaagactaatgggagtagttcccaaggggaaaaacagctctatcataaacaaaaaatagataagaacagcaagtatccactctgttgtgtactgatgagcaatgttcaattctaactgccttgttcctttctgatcctagtactgcctcctgtgctcgtgccaagacacagtgaatataacccccagctcagcctcctggccaagttccgcagcgcctccctgcacagtgagccactcatgccacacaacgccacctatcctgactctttccagcagcctccgtgctctgcactccctccctcacccagccacgcgttctcccagtccccgtgcacggccagctaccctcactccccaggaagtccttctgagccagagagtccctatcaacactcaggtcagtaagaactatggtctgtggggaaatacgggaaaataagcccaacatcatgatttatgatgaacagtcacaatgacagtcattgtaactgtcattcatatagtataaacagtttacaaagcaatcagccttaaaatgattaggactatacctattttgaagcagttaccctggagatagaacatgtttttcctctagttttagttctaatgctctggaagctctcagaaactaaatggatttgaatagtatccctgggaatttccaaggatttttttttttaaggcagtagaaataagatgaaaagacttctgtaatccaagcagaagacttggcctgaggacaagcaacatggaagatcaatgctaggcctttaccttggttgcctctttcaacaatcaaaggaagcccttgcctaaaacatatgcctgcatcctttgagtgaggcagaaagtgaagccccagctccagccagtgcattatccctttctgccatgtgaagccaggacagcatcttaaatatagagctcttcagtttgctgaattgagaaagcatatggaagggaaagggagcctctagcatgctgtcataattgctcttgctaccatacctgtaaagtggatctaagttgagataatgaataaaagatacatatgcactttgtgagtgtgagataaatactgtgcggagctgacaagttcctaaaggcatgcataaatacatttggtgccagatgttacaatctgcctcattcatttattcctataatcatttatttaatggatatttattaaactcttactatatgcaagcattgccttaggattgctgaaaggggaattaaaaggttaataaaaattgtccctacgatgtgggaagataaagagggaattgcctcttcacctctcagttacttagttccttttgctcctcagcaagttacataagcatctattatatttgttgcactatattatataattcctgtgtgtctattttccccattgaacagcgagccttcttttttctatgtctagcacagagcctgaaatgcagtggttgctcatcagttgcttattgaataaataaattactacacaggcgtttatttatttttattttttattttttattttgagacggagtcttgctctgtcacccaggttggagtgcagtggcatgatcctggcttactgcagtctctgcctcccaggttcaagcaattctcccacctcagtctcccaaatagctgggattgcaggggtgtaccaccatgcccagctagtttttgcatttttagtagagacggggtttcaccatgttggccaggctggtctcgaactcctgacctcaggtgatctgcccacctcggcctcccaaagtgctgagattacaggcaggagccactgcacccagcccacacaggcattagaacatggacatggagctccagaccataggcacaggttttattgactcagtaagtgatgactgagcacctgctaagtgtctggcactgggccagtgctagaggtgcagtgatgattaagacggtgtagttgtccccccttatctgaggtttcagctaccagaggtcagttgcagcctgaaaatactggatggaaaattccagaaataaacagttcataaattttaaattgtatgtggggatgaaacttcgtgccatcctatccaggttctgaatcattccattgcccagcgcatccacgttgtagatgctatccacctgtgagtcaattagtagctgtctctgtgatcagatctactgttgaggtcactctgatttaatagtgaccacagagtgcaagagtagtgatgctggcatattgttctagttgttttactttattattagttactgttcctaatctcttactgtgtttaatttataaattaaactttatcacaggtatgtataggaaaaaaaacatagtatatgtggtattctgtactagccacaacttcaggtagccactgggggtctcggactgtatctctggtggagaaggggggactactgtggtctctgaccttcaggagtcagtagctattgagagccatcacatacaggtagcctgtagcagtccaggcaagtgattataaggagttgaactaaaacagggatatggggttggaaagagggcagtgaattgggggagggaggtccaacaggacttactgtagggtgaaggcagagatgctggagggtagcttgagagtcattaactcagtgtaggagcagatggttgaagttttgcaagtggctgagttcactgagaaagaagaaatacaacagaaagagaagtcatttgaggacagaaccttggttaaggaacaggaggataatagtgttgcaaaatatatatttacctaacacacctctatgctacaaagacttcctgtgctgactttgaattcctgccctggttactctgacaggttgatgttctttttactcttcccacccaagcaggacagacaccaacagtgatgcagaagctggttagtttctcacagaaggcatagcccttttcacttcaaagaaaataattcttgtctgaatgattaacagcaaaatgccaacctgagtaacagacctgtagataaacaagagtaaaaggaacctttgcgatttactggttcagcctctaaattttttaaaaagctctattgaggtataattcacataccatacaaccacccatttcaaatgtacaattcagtggtttctcatatgttaatttttttcaagtagtggtgaaatatatctaacacaaaatttgtttaaccattttttttttttgagatggagttttgctcttgttgcccaggctggagtgcaatggcacaatctcggctcactgcaacctccacctcccaggtacaagccattctcctgcctcagccttccaagtacctcggattacagacatgtgccaccacacccggctaatttttttgtatttagtagagacggggtttcaccatgttaggctggtcatgaactcctgacctcaggtgatccacccgcctcggcctccgaaagtgctgggattataggcatgctccactgcacccagcccattttaaccatttttaagagtacagtctagccgggtgcagtggctcccgcctgtaatcccagcactttgggaggcttaggcaggcggatcacttgaggtcagcagtttgagaccagcctggccaacatggtgaaaccctgtctctactaaaaatacaaaagttagctgggcgtggtggtgcatgtctgtaattcagctactccggagactgaggcacgagaatcgcttgaatccaggagtcggaggctgcagtgagctgagattgtgccactgcactctagcctggtgaggactattaaaaaaaaaaaaaagtacaatctgatggcattaggtgcattcataatgttgtgcaaccatcaccatatctattttcaaaaattttttcatcaccccaaacggaaactccgtactgatttaacaatagctccgtatttccctactttgccagcccctggtaagctctatctactttctgtctctctgaatttgcctattgcaagtacctcatatactagattcatgcaatatttgcccctttgtgtatgttttatttcacttagccaagtattttcacagtttgtgttgtggcatatatcggtagttcatctttgtgactgaacgatatctcattgtatggctataccacattttaaaaaatcaattcattagctgttggatatttggattgttcccaccttttggctctagtaaataacaccctgctttcaattcctttgggtatatacctaggagtggaagtgctacattatatggtaattctattttcagtccccctttttttaattttaattttttagagacagggccttgttttgttacccaggctggagtatgggggcacagtcatagctcactgtaacttcaaactcctgggttcaagtgatcctcctcagcctctgagtagctaggattacaggtgtacaccaccatgcccagctaatttttaatttttggtaggatggggtctcatcatgttgcccaggctggcctcaaacccctggactcaggtgatcctcccacttcagccttccaaaatgctaagattacaggtgtgagccactgtgctcagcctgttctgcttcttgagtaaatagacatatttagtcaaagacctacaaaaaggtcatcttgccttataactttttcaccaaagtcataggagtcatagtccattttctcacaaggaaataccttacccatggtttcctagtatggtccacgaaccctgcattagaattgccattggggcatgttaaaatgtacatggctacattcaaccactgacctattgaatcggaattgctaaggatggggccaggaatctgcatttttagcaagctccactggcaatttttgtgtacacttaagtgtgagaactacttgtgtggacaattcgatacaacaaaggcagattgatccaaccttttacgctgttgtattccaccacgcatgttaacaagaccattctgaactaacattagacatgcatactgaaggaattggttgttttgtgctgaggtcctccataaagagtttttcctgtgcctcatgagtttttactgtgttatgaattattatccacggaatgcatcccatttgcctaaccatgatcactgtccagtcacaggactgtcatttgggtagaagggcccttctcagcgtgccttgggtacaaggttataattacgtttcaggtatcttgaagtatctcagggatagagcgtccccgtggccattgtacaatttgtgacaacatagaagctgaaaattaagctcacttcaaagaaggtttagctttctctgtgttttgcaagccagatcacagactattctgctatgagaaaagctaggagaacaggttctgcatttgaaagtcttgccctgaagtcattagaactcaatgataactcaaaagtcggagggaaaatgaattgaccctttactgaggctctcagaacaaccagtttcttctgtagggtactcacagtgtcacttcagaagagccttgttacattaatatggtctctctgtaggagtagcactgtccaccaagctcaggagtttaatggcaaaagatgtcggatccaactgtctttgtgtggtttatcgatttgacaattcctttgttctactgctttcttttagttgacacaccacccctgccttatcatgccacagaagcctctgagacccagagtggccaacctgtagatgccacagctgatagacatgtagtgctatcgataccaaatggaggtaaattgcagatgaacagtgaaatgtagctattttccaaaagtatttcctattacccccaaacaaagcaactcaaaaaagaaaaccagaaatgtactggcctgctgttttgcatgtgttttaagaggcaaatgggatggctttgcattttaactttgacattcctcagtacaatagaattaatgttttgtttatcatcattactagaacaagttaactttttattttaactcagcatttagaagtttgtagttcttgatgttaagtatggagttgggaactcaagaagttagggattttattctatttgtgtttttactatatgtttatagtggtgtctttcagttggccagagaggtactcttagaaatatacataaatgaggtttttacaaaattttatttgcatcttataatagtctagataagtgttgctcgaccttaatgttcatataaaccacgttgtgatcttgcataaatgaagatttttattctgtagatcttacggtggggtccaagaatctacattgttaagcttccttgtaatgcggaggctactgttccatgagccagatcttgagtagagaggttctaaagaagtgtaccatttgaaatactccaagtgaatattttataagctaagatccttttgtaagagaaataataacccccaaatttatctgtttcataaatttatatttaatgcatataggaacacactctagatgcaagaatgacaaggatgttcaaggaagagaaaggtaatacaatcactagaaaggcagagaaagggtgtgagtggcaaagaaagaaggaactctgaactttggttagttacaggaaagtgacttaactttatgttgggtgtgaaaacatccatgggtttcctgatgaaatatccagctctctttaaatgtttttttttttccatgcataactagatatccacaaagcagaatgtgagcccctctatgtggaagctttttttttccttaaataatttaatgtcctattcagcattattgatttgctttttatcatagtcaaactattgttttccatctctagtttgttagaaaatgatactttttgccacaaggattcaagtgggcacagtaacagcaacatgccatctttcacatgtttctgaaagaagaggtgacctgccagcttcctttgagctgtgcttgctttagggccgacagtttttttatgttcatctgttcatgtcatgttttccctggccccttcatgaccaatacacatttataaatgctctagccatggaagatgaacaaggaccatgggctctacatctcaggtgtgctagtgaaatgagccggccccaaacagctcccatgagagctacaggttctaaaagattgcagagcggcatgcttggtcttgcagccgactttctggtgaaaagcattaactaagtttcctggtggaatcatgaactacacagcccaggtatgacagtagccatgtgttctctggtttgttttcttccagactttcgaccagtttgttacgaggagccccagcactggtgctcggtcgcctactatgaactgaacaaccgagttggggagacattccaggcttcctcccgaagtgtgctcatagatgggttcaccgacccttcaaataacaggaacagattctgtcttggacttctttctaatgtaaacagaaactcaacgatagaaaataccaggagacatataggaaagggtaagagcaaagatgttattcctttagtcatctagccgaaatgtagatggtcatgtgtgtagaagtgcacgtgaccaccctcacatgttggtcatgtgcccctgtggaaggaccccagggctggtgagctctgagatagctctgacattaccactggggaaagcacataggttgtcaggatcttagtccctcttcctctaatgtcatcatgccactttctaggggtggcatggagtggggattgtgaagacaagcaagatgataaatatgaagaaagccggatgaaattattaaatagaagtgttatgcattatttttcatttccctaaaacttacaaactaggatcatttctgaagaacaggaattctgactagatgattatttgtatcaggtgaagttccctttggagacttagcagctaggtagttagaaagaatgactgatttatgtctggaagcctttggcatgtgattggggctctcctgtgtgcaggctgattgggtacaagtcatactggtctcttttctgaccagtgatgcttttgaagcccatctcattggtctgagtgatggtagcaaatcccagctgagtgtgtggtctggctgaggatctttaaattattttcttttctattggaatagttggtatcttcgattgataccatggagtcatagatgtgaagaaccttcagtcatttgaccttttctctctccatccagcacttaagccacctcgggaagggagcctgagccttttctttcaaatttccaggggagattcattgttccatttggtgatgcattctaatattcttcctaacataccttcaaaatgtctcctgttggagtaaacctaaaagccattgtttagaaacaggttgaaatcattcattgatgttgactcttaatggagacagttactttatgtttatttatattctgtctccatagtggctttgaggccacttacgagaaaccattgcagtgaaatgataaatgaaaaatagaaaatcagaaacgggtcgaggggaggggagaagaatccagatatgtcatccataagggttagcattgttaaccaaactaagcagggtcgggcctggttagtacttggatgagagaatgcctgacctcctgggaatgcagccctgtaggtctcaaccttattttacctaacccctattcaagatggagttgctctggttcaaacgtctctgacacagagagctggagaagatggtggtgattttactctaggtttcctgacaaggagggaagaaatgaaaaactcactctggaatgtaatttttatcccaaagggggaaaatagccattcctcaaaggaaataatctttgaattaattcctaaacaagtttcttgagcatggctttactttcaaatgatttttagaagaaccttcagtgaactctcaaggcaaaacattaacacataatgttgtgaagcagtttgctgaggagctttgcagattggtctgcatgttcaatttctgctggtgccagtggatccaaagacaggattaaagtattaaaggagtgctgaatgtgttctaggaacctgtctgcaagtcgcttcttcaaggtgctcctgctgaggacatggagagtgtgtggtagtctgtttcactgctataaaggaatacctgagactgggtaatttattaaaaaaagaggtttatttggcccatgggtctgcaggctgtactggcatgtgcttctggtgagggctttaggaagcttctgaaaatcactgtgtaaggcaaaggagagcctgtgtgtcacctgggaagagacagaaagagaagggagggaggtgctggtctctttttaacaaactgatctggcaggaactaatagagtgagaatccactcattacctcaaggagggcaccaagcagatcatgagagatccttctgtgtgacccagatacctcccaccaagccccacctccaatattgagaatcagatttcgatatgagatttggaggagtcaaatatcccaattatatcagtagctcctgtgttgttgactgagagctcgtctttagggttaagaagccacatgagcaagagctgggactgatgacctgttctgcaaactggagcacctaatagtgctcccctcgatgcaagggtactcactgtcacatggtccgaagacaaagttacagttttctcagagctgcttagaaattactccaatgtggaaaaaaatttttttttggacatgccacaagccttgccataaagcgtgtgggtggaaaaaagtgttggcttgggagattttaaagcaagggcagtcagtcttctgtgagatcacaggattctctctcagatgctgccatgggttatctggttctgagcagcatggcttccaggagcaccagcctgagtaagttatctgcaaaatgcattcctcggctagcaaatgagttaacttgctctgtggagttagttaacagacattaggttttagtaatatgcattcatctcacgagtacttactgagcatcgcctctcagccagactggacacgagggatgcaacagtggaagaaagaccatgagcaggcttcctggattgcttgctgctggggaaagacagacacgaaatacaacatacagtatgtccaatagagaaacacaaagcaggggaagagaatggagactttaaaccagcgtaaccagggaaggccttcctggaaaagtgacatttgagaagatgttaccagaaaggtgtcccgattcagaccccaagagaagattcttggaactcacacaagaaagaatttggggtgagtccatagagtaaactgaaagcaagtttattagagaggtaaagaaacaaaagaatggctactccacaggcagagcagcagcatgggctgttcgactgataatgtagttatttcttgattatatgctaaacaaagggtggactttttcctttttcatgagttttctgggaaaggggtggagatttcctggagctgagggttcatttcctttttagactatatagggtaacctgggcacggccatggaatctgtaaactgtcatggtgctagtgggagtgtcttttagcatgctgatgcattataattagcatataatgagcagtgaggatgactagaggtcactttaatgccatcttggtttgggtgggttttggctggcttctttatggcactctgttttaccagcagggtctttgtgacctgtatctcgtgccaacctcctatgtcatcctgtgactaagaattcctagcatcctgggaatgcagcccagtaggtctccaccttattttactcagcccctattcaagatggagttgctctggttcaaatggctgtgacacagagagcaaggaagtcagtgttcgtggagcctgaaccagtctgtcaggttaaattttagagctccctggctgaggagagggggtccattcaaattgttgcggggccttccagttttatttttggtttacaatatgatctgactttacactttcgaaaagattgcctggctgttctattgagattaattagacggtgatgggcaaggatggaagatttttttttttttttgagacgggagtcttgctctgtcacccaggctggagtacaatgaaacgatctcagcttactgcaacctctgcctccagggttcaagcgattctcctgtctcagcctcctgagtagctgagattacaggcgcacaccaccacacccagctaatttttgtatttttagtagagaaagggtttcttcatgttggccaggctggtctcgaactcctgacctcgggtgatcccctgccttggcctcccaaagtgctgggattacaggtgtaagccaccccacctggcctgaatatatcatttttaaaaattctttttagtgaccagacgcagtggctcatgcctgtaatcccagcaatttgggaggccaaggcaggcaggtcacctgaggtcgggagttcgagaccagcctggccaacatagtgaaactctgtctctactaaaaatacaaaaaattagccgggtgtggtggcgggtgcctgtaataccagctacgcaggaggctgaggcaggagaatcacttgaacccaggaggtggaggttgcagtgagccaagactgtgccattgcactccagcctgggcaatagtgcaaggctccatctcaaaaaaaaaaaattctttttattatagttaatgatgagccattcccctacccagtagatatcaattagccttcacaccatttctggcttttattccttgtgacttaaattagctaaatggctggccctgctaaaggaaggtcatgttgccaccctgtcagcactgcgtgcattttgagttttgttttctctagtggtgatgatgggtcctcatttaccccacttaccatctagtgggtatgtccctgaggtagaggggctggtagaaagcatttatttgtagccatgcagcagttaactggtacaaagggactgaacttatgactttgacctcactagcaagatgctttaaatagctactaacagttagcactagcacaccaaaagctaccacttaaatgtcaaaggcaataccttgggcagcctggaacatctcattccagtgtgggatctatccatattcttccttagaaactaggcagaccacttgaactctctacaatgacatatcaaataataataatatgatgatgatgatagctacccccactgattacctaatatctaagagacacgctggtggccgggcgtggtggctcatgcctgtaatcccagcactttgggaggacgaggcgggtggatcatgaggtcaggagatcgagaccctcctggctaacacactgaaaccccgtctctactaaaaaatacaaaaaaaaattagccgggcgtggtggcaggcacctgtagtcccagctactcgggaggctgaggcagaagagtggcgtgaacccaggaggcagagcttgcagtgagccgagttggtgccactgcactccagcctgggcgacagagcgagactccatctcaaaaaaaaaaaaaaaaggtaaaaaaatttctccctttgtgggagaaaataagtgataaccattaaccctggttattgaactttctgagatagatcaagcgtatcctgaaaataattatcacatattccaaatcattgcattgtttttggaattgggctttttttaaaccattttatgaatctttattttcttgtatatctcaagttctgtataattctagtaattcttcttgttttatgaaaggaattatcttgacataaggatttcaccagtcagctccttgcagagatgttaccggaaagcggtcctgacccagaccccaaaagaaggttcttagatctctcacaagaaagaatttaaggcaaatccatagagtaaagtgagggcaagtttattaagaaaggaaaggaataaagaatggctgctccatggacaaagcagccaccagggctactggttgcctatttttatggttatttcttttttttcttttttctttttttttttgagatggagtttcgctcttgttgcccaggctggagtgcaatggcacaatctcggctcgcctcaacctctgcctcccgggttcaagcgattctcctgcctcagcctcctgagtagctgagattacaggcatgtgccaccatgccctcctaattttgtatttttagtagagatggggtttctccacattgctcaggctggtctcaaactcccgacctccggcaatccacccgcctcggcttcccaaagtgctgggatttcaggcgtgagccaccgtgcctggctggttatttcctgattatatgctaaacagtgggtagattattcatgcctcccctttttagaccatatagggtaacttcctgatgttaccatgttcgccatggcatttgtaaattgtcatggcactggtgggagtgtagtagtgagaatgaccagaggttactctcatcgccatcttggttttggccagcttctttattgcagcctgtttcatcagcaaggtgtttatgacctgtatcttgtgccaacctatctcatcctatgacttagaatgcctacccgtctgggaatgcagcccagtaggtcttagccttattttacccagcttctactcaagacggagtcactctgtttcaaactccttgggcagagggtctgcatgtccaggtggtatttgggttgcttcctttcccaatggatttcacttccctgtctcaaaatagtccttttgttctgcctctgaacacatgtaaggcttctcatcttaaaaaaagcaaatcctaaaaaatattttaacataggatgcaatgtcacactgttacagtcattaaacttgatgttgcagaatacttaatatcctgagaaaatgttcacaagatattattaactgaaaacaagttttaaaacatcctgtagagtatgatcccaattttcttcttaaaaatgcacatggctgagcatggtggctcacacctgtaatcccagcactttgggaggtcgaggtgggtggattgcttgagcgtaggagttcatgaccaggtgggcaacatggtgagaccctgtcactacaaaaaataccaaaaagttagctgagtatggcggcgtgcatctgtagccccaactaggcaggagactgtctcaaaaacacataaaaaagactgaaaaatgttaatagctaataactaatagatgttagctttgattatttctgggctgtggatttgtggctgatttttcttttctgtctgtattttctaaattttctatagtgggctttcttgatcctgtgaggatggggtgggcatggtgtgtaagggtgctctggaaggcagcagcagtggtaagggagacacctcacagtgcagcccaggcagagtggctgcgtgtttgagtgacagtatgggacatgccgtgtagtacagttggacccaaacaagcttgtttatcatgttgtcctgagaaacttggtcatcaggggcagtcttggaggaccagccttgctatcagcccagaggtgactttgtgtgagttaggaaaaggtgcctcttcctcaagagaaattactgccatctgctgggaaaggattgtaataattacacaaagctctgaagactaggaggcaaaccctggtttgcagtggttgtgcagtgcacaacggtaggcacagtcctctggaagacctgcctccatcctctgacctaggccctggtgtggatctggaaaaatgtatttttatattattagtatttttttttaccacccattaaaacttttttattgtgggaaatttcaaataggaaaacagagaggggaatataatgagtcttcatcttagtatctccggcttcaataaagattcacattctgtgccgttctttttcatctatcgctctacagtatttttgctagaatattttagagcaaatctcatgcttcatatcctttttcccatctattggagtttatatctaactatataagaaataataccattattacactcagaaatatatatattttcttaaagcttctaaaatagctgtgcagaagaaaaggcaacaaaggcaaggggaagattaattacaaactcgagaggaggcgttgtgcttgtgttgggacgtttaggttttgtcctaagaggagtggagaggcttctgcatcttctgtgcaggacactctgccttttatggtgatctttttgcctccctcccagtaaggagggtatccctgcaccttccttctactttgggacactgacttcttcctctgttagtaggttccagagattggcacactctcaccagcctgcccaacctgccctcttcccagtcatttcctgtcattcaaggcaaaagaagaggattgaaaggggacacactattgtagttccacccagcaaacccaaattaaacccaaggttcttctagtcctcattaaccacaacacaggactccacactccatgatctcataaaaagtgggtggcagtcacacacaaatggaaagttcagataaagaaagacacagcccaagcagatacagagcccaagatgtgggtggaacttgcttgagggctgcattgccagtgttctctttatgatctcaggcagtacttcctttggggcatttattccttattgctaggagttagaacaggctgcaggattgtaacactagcttttccttccacttctaatgctactaaattacaataatgaacatattaatggcatatttgattgcaactaacaggtgtgatgtctcttttaagcatttcatacagaactgtcagaatgtaggctgcagtaaaatctgcacatgttcatgcttttcctgtaccgttttaaaggaatatcactggctaggcatggtggctcatgcctgtaatctcagcactttgggaggccgaggcaggtggatcacctgaggtcaggagttcgagaccagcctgcccaacatggcaaaacaccatctctactaaaaagacaaaaaattagccaggtgtggtggcaggcgcctgtaatcccagctactcgggaggctgatgcaggagaatcgcttgaacccgggaggcagaggttgcagtgagccgagatcgcgccaccccatctccagcctgggtgacaagagggtaactccatctcaaaaaaaaaaaaaaaaaaaagtgcaggtcacccggcctcaccctggacctgctgaagtagtgatctgttttaataagccctgcaagtggtcttagtgcaagctaaggtttaagaaccactgctctactctgtggtgatcttgaatctgacactggcgtttaaagctactattctggcctaccaaatggatgcaaataacattgttggcctacttgactcctcctcagatgctggtgtctctagccagaatctggcctccctcaccctgaggctgggttccacccttttctggtgtttctgggcgggctccgcatgctggtcccattggctctgctcttctctctctggatgctggacgactgcctacctgcccaggctcttctctgcattggtagctttgccaaagtggactgtggttgcagatgacctgaacaggattgaaaaccaacccctgaagatagataacagactcagataacaaaaaaatcgtatttatcttatgtaataggttttgagaggattacatatttgaaggtcattcaattcacataccgactaaatccttagcagctccactctggccccttcacctgctttccctcttgaaaaaacctccgcccaccctcacaaggcaggtctttcccctttggagcccacaggggttgttgtaagaggcggtgtttgcattttgccctggcctggggttctctttatgatcgtgagggtccagccaagtaactctcccagccagttaggaccatccttctgccccctggcaccaccacctaggccctggggttagggcccaaggccattcaggagagtgggtaacagcgatgagatagaggagggagaggaaggctgagggaagcggagaaggggagccagtctctgactgaggaagaggagaggcagtgacaggacagtcgtggactggatatccagggctgtgctttagctgtgcgaccctggctcagtttcttcagagtgatgtggttgggatacatactactcaaaattgttcttttctaaaattttattaagggaaaaggaaacaataaatatggtgggatgtaatcacatataatgcagaactgcctcaagtgctacttaggacctgacaaagaaactcccagcagctatgtcagtaacgtttcctagattcagagtcatgcacacgaggccctgagcagccctggaagctgtgagttctgttctttaaaagtttcacaattagaccccaaatatataagtatattctggattgtttctacaaacaccttataactgcatagtgatcatatgtataatcacattgacttctagtgctggagacttttttttccccatcaaaagtgggagtaaaattgttctgatatttaatattcactagactagaatttcttcatttttttctaacatcagtccctcgctatacatttatattaaatctcaaacccagacatttagagggaaaggatcaactaaaatttaatttggaatggaaattagcatgagcagcaacattctcaggatgcttttcttttttttttttttttttttttttgagatggactctcactcagtcgcccagtctggagtgcagtagtggcgtgatcttcgctcactgcagcctccgcctcccaagtagctgggattacaagcgtgtgtccccatgtccacttaatttttgtattttttagtagagacagggtttcaccatgttggccaggccagacttgagctcctgatctcaagtgattcacctaccttgacctcctaaagtgctgggattgcaggtgtgagcacccagcctcaagatgctcttttgaactttaattccaagaatattagataaagtgatgtaggctatattttgcttatgagtttttatattactgtatctgaaaatgtagaaatttcacttcacaaatcaaaatagacattatttatatgatttatattagtggatgacaaatttaattgaaatagatctctgaggtatttgttaagagaaacagatttataagtattggtaaattttttaagtgtcttttattgtttcctctgaggtaggtttaatatgtgcacttaagttacattttcatgatattaactgtgtccagttttaaattttaaaatttgtgggctgggtgcagtggctcatgcctgtaatcccagcactttgggaggccgaggcgggtggattacttgaggttgggagtttgagactagcctggcctggccaacatggtgaaaccccgtctctactaaaaaacaaaaattagccagctgtgttggcgggcacctgtaatcctagctactcaggaggctgagacaggagaatcacctgagcccgggaggcagaggttgcagtgagctgaaatcgtgccactgcactccagcctaggcgacagagcgagactccgtctcaaaaaaaaaaaaataaaatttgtgtatgtacaatgaaggattacttgatttttttgtgtgatatattcacttcatttctaatattataaaaccttatttttggaacaaataaacaggaatgatgggaggaatagtatatgagaccttactgactggttcttgggagtgattgttaacatgggttgcaatccacttttatttttttatttttatttatttatttttttgagatgacatcttgctctgtcacccaggctggagttcagtggcgctaccttggctcactgcaacctctgcctcccaggttcaagcaattctcctgcctgagcctcccgagtagctgggattacaggtgcccaccaccatgcctggttaatttttgtatttttagtagagaaggggtttcactgtgttggccaggctagtcttgaactcccgacctcaaatgatctgcccacgtcgggcttccaaagtgctgggattacaggcgtgagccaccgcacccagctgcgatccacttttaaatggatttgtggaaaaagcacagattatcattaaactaagcggcatttaggtcacacatctcattcatctgatcagtgatctgacaacctgatgggagagtcacatctcctagggtttcaggaatcagtgggagaggcacgctatgaaagggcatgtgaaggaaggctgtgtttttgtgtctgcaggtgtgcacttgtactacgtcgggggagaggtgtatgccgagtgcgtgagtgacagcagcatctttgtgcagagccggaactgcaactatcaacacggcttccacccagctaccgtctgcaagatccccagcggctgcagcctcaaggtcttcaacaaccagctcttcgctcagctcctggcccagtcagttcaccacggctttgaagtcgtgtatgaactgaccaagatgtgtactatccggatgagttttgttaaggtaaggagtgcttgctatcacgttataaaatgttcagtgaaaaacaaaacaaaaaagcaccctgactgatgtggcaggcagttgtgcggtcaattctgatagacaaaaccaatttattattattattattttttgagacggagtttcactctgtcacacaggctggagtgcagtggcatgatcttggctcactgcaacctctgcctcccgggttcaagcgattttcctacctcagcctcccgggtagctgggactacaggcacgcaccaccacgcttggctgatttctgtatttttagtagagacagggtttcaccatattggccagagtggtcttgaactcctgaccttgtgatcctcccatcttggcctcccaaagtgctgggattacaggcgtgagccaccgcgcccagcccaaaaccaatttttttgaattctattgtttttaggaggagttcctctttgagtataaactgtcttgtttagcaattatatgaaaattgttacacattacttttgaggaaaaacaaggtggctatttgattgtttttaatgcagatgataaagtaacaacagtaattttacaggactagtgcaacagagattttttccatccttccaattgccaagcactgttatcactcagtgaatgttggtgaatttatctgaattcagtaagatactctccttactcttagaaagcatacaggcacatggaggagataatatttatgaataagctacaaaaataggcagggttggttctaatacaagataataaactaagtagtgttataaaggtataaacaatttggaatagaaacgggtgtgattaattcagagagcagtatatgttctgttgatgaatatttgttgaatttctcatatcgaatcttattaaggttgctatgaaggctggagaaccaaggaagtttcttagtgggaaggaaagacaactgggtttgtatatggaagtgaaagccttcagtttcatcacctgctattttgtctgttgcaaagtactcgcaaatgagtctagtatttcaaaatatgggcttatcaaagtatcggggtatgtgtgacagttttcttactgccatgattccatccagggaatcagcatggcttgttccaggcatttttttcaaagtaaattttattagcactttaaaattaccatgacaaataatttttctatactcaaattatgtttttattatcactttagtaattatttaaaaagtaagaacaatatagtttccaattttaaaaaacagctgcttgaaattatttctctttcatggtgacaaagcagtttcattcaaatttagtgttttgaaagcatatattataaagttatattaacaaataacttcgaaatcttttcaaatgttctgttgctttagaaacggcagagggcatcatttgaatcatacagttttttttttttccgggtctgtgtttttaaaattaggatgaaatgccaatatctcataggtaattatttcactctgattaaatataagcttatatagaaatctgattttcctaataactagatacatttctcagataggcagcatttacattcataaagctacacaattgacacagaagacaaactgttcctaatactgcaggaacttttaaaataaatacatagtaaatataactatagatcatttttttttaacatttgagatgagcagctgtagctaccactgggctgatggatcagatctctttaaggtttctttcagctctgatttttactgattctaggacttagtcagtcaacaaatgtttattgagcacctgccatgtgcaggccaggcacgtgggacatgccaatgtttactcacagatctctgacctcagggaaccaatattctaggaaggagagatggataataaacaacagccaaaacacagaagaaggatggaaagagaaagtctgggggcagggtgaagggaattggagcacgggggcagtggagtcatctgcacatgagggtgggcctcattgaaaaggtgacaggtcagcagagactggaaggagacatggagctaggcccagggacccctggaggaagagcagaagaagagggaagagcaaggcaacagcatacacctggaaactctgaagagcaggcaggccagtgtggctggggcctaatgagcaggggaagtgagatgagagcagccgcagggaaccatagcaaggcctcctgaacctctgctacgagttcagcggtgactgtaaggaggtggcgagcttttgcagggatcagagcagagcattttcatgatctaacttctattcttaaaggatcgccctgcctgctgtgtggaggatagatattatacaggcaaggttgcaagtagggaaaccacttaggaggctatagtaatagtcaggtgagagtcgcccccacctggagggatccagtacagctgtgagaagtggaaggattctgaattgtgaaggcggatcaggcgtgggagaaaaagaggaagatgaagttagttgccttcaatcaagatggagaagacgcaggtgtaattgagatgtccgttgcattcaagtggagttgctgagtagccagttcgatataagagtctggattcggggagagaggtttgggcttgaaatacaaatttgggaattgtctgcaaagggaccgtatttaactccctaagtgtggatgagaacaccaaaggtttgagtttaaactgagaagagccgggcgtggtggctcatgcctgtaatcccagcactttgggaggctaaggtgggtggattgcttgaggtcaggagttcaagactagcctggccaacatggcaaaaccccatctctactaaaaatacaaaaattagccaggcgtggtggcgcgtgcctgtaatctcagcacttgggaggcttaggcaggagaatcgcttgaacctcggaggcagaggttgcagtgagctgagatcgcaccattgcactccagcctgggtgacagagccagactccatctcaaaaaaattaaaataaataaataagaaagggggctctaggactgagccctgggacacttcaacatttaaagatgggacagaagggacagaatcagcaaagaaaactgagaaagaccaaccagtgaggtagtaataagaccaagaagtgtggtgctttggaagccgagaaaagacagtgcattgatgagaggatgtgatgaactaaatcaaatgctgcccacataacacaaaggctgagagctgatcattcattttaacaatatgaaggccttttttgatcttgacaagaaaagttttgttggcggctggggtgagatgatgatcagaatggatttaagagagaatggaaggagacaaattgagatggctagtatggatgactcttctgagggtttttgccagaaatgggataaaaacatagggcagtagctggtggggggtggagaagtatcttgaaggtggaagacatttcagtgtgttcatatgttgacgggaatgatatagtagacgcaaaagattgcaggagagaaggggaagatttgctggaatgatgtctctgggaaggcaggtctgagagtgcattaatgggtggaccagcttatttggaaacacaaataattaatctgtggtaagaggtagaaaggccaagtatgtggatgcaggtcctgtggaaacttatttctgatgtattcatttttctcattaaaatacaaaataaatatcagttgcaggtatggacagggaaaaaggggttgcaggttttagtggggaggagcgatcacctaggagggggacatgagagaagggactggggggtgggttgtgactgccggggacatcacaggtccacttgaggttctcagtcatgaaagtaaaatgtgatcaggcagcatggttgtgttgaaatccaagttttaaaaaactctacagagaatcactgctcccagtcacagaactgatttacttggctgtgatctcccttcatttttaaatatcctttcattgatatataacatatagagaaaaatatgcaaattaaaaaaaaaaattttaactgtctctcctttgaatggtgataaaagggaaattgccagttgaactagagagagagagagagagagaataagcaagctttgataatgagccctgaaaaaccaagagcgccttccagttctgtctttaccactttcaggtccagtcactggtctgcagtaaccattttgtgcaagacactgtcctgggcatgaaggggtgaacaaaaggtcaagtttcttcctttgtggaagggaaaatgatttttcagtgcttcccgtgtgactggagtgccagaacctctctagatccgagtattcagttgtgaaccctgagggaatgcactgatttggattcatctgaaggcatctggttggtgtgagagttgacctgtgtttacaggaaggtagaggccatgttctctccctctcaggtctcaggagctacgctggggtgtgggctctgtgccccgctgagctctgcctggggctctggaggctgagtgtaagtgtggcaccatcactcagctcctttcttgtttttcagggttggggtgctgagtatcatcgccaggatgtcaccagcaccccctgctggattgagattcatcttcatgggccactgcagtggctggacaaagttctgactcagatgggctctccacataaccccatttcttcagtgtcttaacagtcatgtcttaagctgcatttccataggatagaggctattgcagggagtggcttgtatcatttcagatttgcaactgaagtttctaaaaacatgtgtaaatacatagaatgtatactgttcttattttttttaatcaccgtttgttttgtgctttctagttaacctgatgccagtacagtgcaattggaaaagcaggactttggtgcctgtgctataagcagcagattttgtgggaggaaacacttgagaggcgatattgtcaacagtatttgaagggtgttagcagaataaaagacagctttagtcagccgtgtcattataaagcatgttgtgtggcctcacagaaacattgaaactgtttatacagcaaaagtcaggtattagcagcactaaagcaaatatcactcagatgaaacaaagcagtgaaacccctacagtttaaatgatgtcacttttagtgctgttggcaagaaaaaaaaaacaacaaacttgtacaatgaattaatgagataggccatagaaactttatttctaaggttgacatacctatagctgggctcctgtgctcatattcagtggtacattttaaacaaactgtgatcggaaaagaaaaaaaactgtgaagccaaaagtcatgttccctcagtctaccactgtaaaaacagagtctaatatgggaaaataaatatgaaaatagcatgaaatgctgtttcccagattgcaagataagaccagaacttggtccaagagccagccacccagggagactcctgctttccacagaggagaccaggttcctgtcgtgctggttgttcgtgtcaggcagtcctgcaaactttgagtctgcgcagcgtgccagaatagcttgtgtttcagtcctgtgtcaagaagcaggtgaaaccaaaggttggagaaaagcatcacacgtcgacttacactttctcatttcccacgttccagtctcctgggaagggcactctttcgccacgttttcctgcctcttggcaaatattaactctttgcagatcactaaagcaacagtaaagactttgagaaaatctagacacattattggatcaatgagttatttaacctagtgtctagtgattatctaacctggaaataaattcccaaggaaagtgataataatttcataatcatctgcaatttctggggaacagtggtactgaataataagacatcttttaaaaatatacacaatattaaaaacctgttcttattttactttagatgagggaggaaaatcccccaaatttctaggtactttcatatatatacttgccatgcactaaacactgcattgcttggaaaaatatttcacaccctctttaaaaatgtacaatttaagatggcagttatgcttgtaacagacagcacttcagtaatccaagaagtttcttcatttatacattttatctcaactctttctagcattagtgcacatggtagtttttctaattaaattgtattcaaggtagaaatgatcatgtgagaaagatatatgattgagctactactgtcacctcttacagttactagtgttagctaatagaaactttcatatatacacatagaaaagaattattacattttacattgaaaaatgtaatatatggcccatgtagtgtatagaaaaatctgtagtttattggttcatcaactatgtattgtgcacctacctatgggtgtcaggtacaatgttaggtactgtagaatcaaatgtaaataagagacagtcccagccctcagggagccgagaacctaatagtgaatctgtttgtacagacatcttcatgtttcagaacttttaaaacaaaacaaaataatgtaatctatcatcttttgcttgaaagaatgtgattgatttcttatctctgttttgaaattatttccttactcttctgcaaagtcaggtaatggattccttgtataaatgctacttttcttccatgtctcaaagttgttttttttcctcccctttcttccctgttttccaataattctccatgtccccttttcttagaaaaggcattaatatggtgaatcttgtatgggaaccattccatgggagaacttcaacacagtttttgctccagagatcaaacatagctttcgtgatctctctaccagctatctaacttatcctctggtaatctttttttttttttttttttttttgagatggagtctcgctgtgtcaccaggccagagtgcagtggcgtgatcttggctcactgcaacctctgcctcccgggttcgagtgattctcctgcctcagcctcccaagtagttgggactacaggctaccacgcccagctaatttttatatttttagtagagacggggtttcaccatggtagccagaatggtctctatctcttgaccttgtgatccgcccgcctcagcctcccaaagtgctgggattacaggcgtgagccactgcgcccggcttcctctggtaatcttacacctttacagaattaatctaaactggtggctcataaatgacattaaaaacaaaaaaaaaatctggatgcagtggctcattcctatagtcccagcactttgggaggccaaggcgggaggatcatctgagcccaggagtttggggctgtagtgaactatgatcatacaacttcattctagcctgggtgacaaagtgacaccctgtctctaaacaaaaatcaagaaacaaaaaacttgtatttccctgcagctttgggaagccagaacacaatattgcagtgaatctgaattttctgtgacaaataaattattaaattggcacatatgatcatcaccagtcatgtctcatcaaaagcctttattatgatgcttgtacattttgaagaatttagaattaatgagaagttaaccctttagtcattgtaacacaatcatattttaatcagctttttcttttgctaccaagagtttcaaaaaataaatgcagtatttgatttcaggctgctaaatgggctcatttagcattcattccttgatgtagacattaaaaaaaaaactgaatagcattctttccaggataactaataaagcagacatgctaagcctataaatacatcagcactgcagcacacgtttaaggttgccacggacaaggatcacacaatagagaacactgtagtaacatttcggtctgctcacaagacccagaacattgatcagtttttgttgttggtttattatttttctgttaaaaaattgtgaaaagtttgttttagctagatgatattttaatagctgcgagtgctttggaactataaagatgtcactacttaacacatataccttatgttttgttttgttttgttttacactcagtataaatcaggagaagttagccaaccatctagcatttagaatcctcttttttattgtcttctaaggatatggatgttcccataacagcaacaaaacagcaacaaaaacatttcataaatatcacttgatagactgtaagcacctgcttaactttgtgtcccaaatatttagtgtgtatatatatatatatatatacacacacacacacatatatattcaacaaataaagcaaaatataacatgcatttcacattttgtctttccctgttacgattttaatagcagaactgtatgacaagtttaggtgatcctagcatatgttaaattcaaattaatgtaaaacagattaacaacaacaaagaaactgtctatttgagtgaagtcatgctttctattataataacttggcttcggttatccatcaaatgcacacttatactgttatctgattgtttataataaagaatactgtacttatatgtcttttggctcatttttcctgtaaacctcatagaagattcactgtatgtgggtctgcagctccttaagtcaattaattttaaaccattctattttgaaaatgggatgttaaattccacatgctatagagaaattaggtagtggttttgaattaaacaccttagaataaccgtcatgaagtatagttcttgaagatacttcacagtaactttagaaaggatatatgtagaacctttttctggatagtagcaaatacgtgatattgcagtatataggaaagaatgagcactttcattattgtaaacatctgtacattgctacagattgcctattagaaaggtgctaaaaggcaactggtgagggaaaactaagatgaaatccaaagaaatatgaacacatcatctaaaaatgtaaattctcaattcctttcatctaaatttccttctaatcttaaaaaggaaggggaaactctattacctataagcagctttcttatttacttgatcagagttgtcaatttttttaacgaaatggagctctgtattcaaaaaaagtgttttgtggaactccaaaataaaaacacatgaaagatatgcctg

SEQ ID NO: 14 - DNA, 64919 bp, Homo sapiens
catcctttcttcccttgccatcttgtggctgtgttaggcggtgattctattcctgctgtgttggagggaaaccacccagtccgtagtcagaagacctggatgcagtattaattctaccacctactagccgtgtgcccttgaacccatcatttaacttcctccgtttttacatctacaaaatggaactaccactatttgcctcacggaattgttttggataataccttttcccgtgcatgcctggtataagacaggtgtaaaataaatatctattgaggaaatcctttctttccctggcttttttaacagtaaaggagtattcctggcctgtggtcctacctcttgaaccgacggcgctgggcctactcgcagcggagactaggcccgcccagcaaagccctaaacccaaagggtccggcccaagctttccctgaagccccaccgcccacagactgctcacctccacgtttgacatttccgctcttctgctgcagctgccgatggcgtcacttccaccggaaaaggcaagcgcggccgcgcggttggcgcgaaagtcggttcccgttctgggcaatttccgggttctccagcgtttgctttggggtaggggcggcgccgagtcgggggagggggctgtgcgccgggctggcgcccgaccccagccaccgccctgcggccagcgcgtcccccgactcgccgcccggagaccccgaggctccaacgaggtaagtgaggcgcggagtggggacacagctcctccccagccccaactggggttcgcgatgccttctgtggccttcaggaccctcttttcctgtcctggtaactggccctggagccggcgggtgggcctttgacgccgagaggacgtggcttccgtgatcccagagccaggccttttcctggagatgggaaccggagcatctagccttatgcagggccaagaccatgctaactggcttccatgtttatatttaaaatctgtttactgagggatgaacgtacctcgcaggccgtgggtatccgcagggacagatacactctgtgtatccttaaaacaagtgcaattgaatgtccattggcctaaagggcttagagccttcatagcagggccttcctcagtgtattcaattcgggttaattttgctgtctgatttgcaaggattggtgttgtcatcttttaccttggctttgtccaagttccaggatttcttagaaatgccgttgacgaattcacgggcagagccagaatgtctgtctttaggcattcttgtctgcacagaaaaataggtaggttaaacatgcaactttttatctaatgtggttttgttcttgttaatggttcctttattttgacagttcagaaatgtccagaaatgacaaagaaccgttttttgtgaagtttttaaagtcttcagacaattccaaatgtttttttaaagctctcgaggtaagagttgaaaacatcttaataccgtgaattcattttcttgtttttaagtgtttttgatttgttgggctttatgtcttagaagtagatatttcactttcataataattttatagtctacattaatacagatatatcattatcacatatttttgaattgatctaagtacatcattatgtatttcggggggctggaagtctattatcacattgctgtttaatatggctgacctacagttcttggaaattaagttgctttcatttgtctcctagccagagtggtcctttgcgtgctgtagaaatttgagtcagttgtgtactggtcatacttgaaaattttttggttaattgttaaaaattatgttttattatgtacagtataataattggatgatagtaggggtgatgtagatccttgcttctcacagaacccagcagtatcagcatggcctggaagtttcttcgaaatgcagaatcttggcctccaacccagacttagaatctgcatttctaacaagatcttcagtgtgcattaaagtttgagaagcatttgtagcagatttttttaaacttcattcattcagcaagtatttattgaagtgttcatgatttgataggcacttctctagtacttgggatttatcagtgatgagaacaggcaaagatttctgttctttcagagcttacattctagcaggaggacatagacactaatcagacatgataaattaggaagagaaaaaagcaaaacacgttaaggggttccagaggatgtttcttggggtgggaagagaagggggttataatcttaaatagggtgtgatcagggtaggctttatgaagaaaaagatattgagtaaacgtgaaggaggtgagatagccttgcagatatctggagaagaatgttgcaggcagagagagcaaccttatacagcccctgggaaagtgcctgtagtctctatccaagtttagtgtactgttgtgtagtgagtgagggatgggggaagagtactaaggaatgcgttagagaataatggtaaagaggtcatgtagggccttgtgggccatttttctctcagtggagagccattggagggttgataatcagaagagtaaacatgatctgacttacagttttaaagggattactgtatttaacataaggacctcaaaattggttcagaacatttctgagtgcttactgggtgtcaggatatagtagcaaacaagatacatagaaacttccaggggagagagacaaaaactatatatatatatataaatacgtatttttaaatagaatagactagaagggtagaggaagggtatttgagaaagcctgattaggatgggcatctctggggaggtgacatttaagcagacctgattgaagtgggggattaagtcaggtgaaaacctggaaaaaaagtattctgtgctgcaagatcaagagcagagcctctaaatgaggttatggttggcttgttccagggttggcaagaaagcgggagtggctggaatagaataagcaagagagatgagaagtaggaggtaaaggtggaaagataggcaggaaaccagactgtgttgtcttgaaggctgtagtaagaaatgtggattttattctgggtgtggtgtgaagacattaggttttgagcagatagtgacatgatctgacttgtgtttttgaaaagattattagctgctgtgtagagaacagatttagggcaaggaagggaaaaagagaccacttgggagccttctgcagaggtctaagtgagatgtgatggtggctttcaatagggaaaaggctggatttgagatggaatttgaataggacctaaatacaggagagtaatttcaggtacattcttattttattttttctttcagtccataaaagaattccaatcagaagaatatcttcagattattacagaagaagaggcattgaagataaaggagaatgatagatcactttatatctgtgacccttttagtggcgttgtctttgatcacctcaaaaaggtttgctgacttctagtgtgtacctttggtagtctattttttggtttatctttgctttaatggacatacattctttgcggattataaagtactatgcaacttatgagtacattggaattcttttggtttggcaagaccaggattgaaaggctaattatgttacagtaggctttttttgtttgtttgtttgtttttgtttttgttttttggagacagagtcttgttctgttgcccaggctttagtgcagtggcacaagctcagcccactgcaacttctgcttccttggttcaagtgattcttgtgccttagcctcctgagtagctgggattacagatgtatatacacacccggctgatttttttatttttagtagagaaagggtttctcgatgttggccaggctgggctggtcttgaactcctgcactcaagtgatcctcccacctcagcctcccaaaatattgggcttatagatgtaagcagtaaggcagttttcagtgaaaggggcttttgaagtttatttcttttcttttctttttttttttcttttgttatagggtctcactctgtcgcccaggctggagtgcagtgacgtgatctcagctcactgcaacctccgcctcctgggttcaagcaattctcttgcctcagcctccctagagactgggactgcaggtgcccgccactgcacccgactaatttttgtatttttagtagagacggggtttcaccatgttggccaggctggtctcgaactcctgacctcaggtgatccacccccgctcggcctcctctgaagtgctggcattacaggcgtgagccactgtgcctggcctgaagtttatttcttttgatagcttgcattgtttgatttgcttttgtgtgtgagtgtttaatgtatagtatctctgagaaattatatagtcatctttatttttttcttgtaatgatttgctgatttctctacagtggtcatcaactttggtaaagaattggtgaatgttacaaaatgtaattttgtaagactggtggtcttttccttcttaactcatttaaacttttctcttttttgtagcttggctgcagaattgttggtcctcaagtagtcatattttgtatgcaccaccagcgatgtgtcccaagagccgaacatccagtttataatatggttatgtctgatgtaaccatatcttgtacaagtctggaaaaagaaaaaagggtagatattgatctcatgatgattgatcaatttatatatctatctcttattcttaatttttcactgcatagaagatagcttaaaagactttccgcttattgttcgtgacttttaacaaagttcagtatacaaccacagtgtgtatatatgtatacatgtacattttttaagtaaattgaatatagtagaatttgttttgttgaaaactggctaattgaaattttttgttttaatttaaaaggacactcattttttaatcacttacatttttccactataggtggacagtctttaaaaaaaaggattctaaatcgtttgaatcagggaggtggaggttgcagtgagccaacatcacgccactgcactgcagcctgggtgacagagcaagatttcgttttggaaaaaaaaaaaaaaaagcattctaagagagagctatagaaatacatatatatatttgggacagggtcttactgtcacccacgctggagtgcagtggcacaatcacaactcactgcaaccttgatttcctgggctcaagtaatcttcatgcctcagcctcccgagtagctggaattacaggcatgcaccaccaagcctggctaaaaataaatatttatatattatatagatataatttatgttgttaaaaatacacatgtatatttatatagaagcaaagattaagatttatacatcctttgtataatagtttaatacattcatggagttgaaagggataaatataggaaaataatattttaaaaatataattcatacttatctcccaaaaaataatttggttaattatttaactttataatgttatgtaacacttatgtattcaaactgtcaacagcaaaatgtatttatgagatagtgtataaaagtggaagcaatattgtttgcttcagcattaatgtgttctcttttggggctgcaggaagaagttcataaatatgtacaaatgatgggcggacgagtatacagagaccttaatgtatcagtaactcaccttattgcaggagaagttggtagcaaaaaatatttagttgctgcaaacctgaagaaacctattttgcttccctcttggataaaaacactttgggagaagtcacaagagaagtaagaaagacatttttatattttctagatttgaaaaaatgatgcattcaatcatttttggcatgtgatatactctttggacttactattcagggaaaaaaatagtgtcattactcttttctccagcgaaaacggaagagcagaatctacaagctcttattaccaagatataagttgacaggcatagaatgggccaagggtttagcattagctacagagtaggaaatgctttggtgataaagttctcagctgtaaatatttctgaaataattgagaaaacgagtttggcaattctgtagcttttatgttgcattatccttcaacaccattcccatatgttaagatagataataaattagtcattttggcagttgcattccttccaaaagatggcatatgtaaggttgaatataaacatatgcaagtcatcagctgagatgtgatcatttaataaatgctaattgagcccattttacgtatctgacttgaggtaggcattaggtatatgtagtaagcaaaacaagatagtcacttccctcatggagcttagagcctatttcaaggggcacacttcagtttcccctgcaactagataaacaaccacaagaccaaacaccacagaattgtattggcatacgaattatatcggcacttttctgggcttgttttcaacaccatccagcatatcccaaatatgtctccatgtcagcaactctcattcccaatgtgattacttcatcagcacacctccctagcatggcaacagaataatgatatttttgttggtattttgccaaaaatcattgcttttacttgtatagaataatggaaagattaaaaagttcatttatctaataggcaaccaaattacctttgggtttttaagtagagattcagacttatcattttggaaaatatactatgaccagcaagggctagagttaaggaaatatatatttttcccttaaaatggttttgagagactgtatctgaaacaattactttgttttagagacatgttattgaactaggtgaacaattagtgtaattctgttttggtggttctcctttgtaaaaaaaagattataaatcctaaaaaatgagggaagcaatagtgatatttgtgttgtttttcattattcttctggtaaatttaatatgttcttttttaaccatttgattcccacagaaaaataactagatatactgatataaacatggaagatttcaagtgtcctatttttcttggttgcataatctgtgtgactggcttatgtggcttagacaggaaagaagttcagcaactcacagttaagcatggaggtcaatacatgggacaattgaaaatgaatgaatgtacacacctcattgtgcaagaaccaaaaggtaaaactgtgtttcacaaagggacaaatgaaacattttctctagtatttaatattttatttttatttatttatttatttattttgagacagagtcttgctctattgcccaggctggagggcagtggcacaatctcagctcactgcaacctctgcctcccttgatcaagcgattctcccaactcagcttcccgagtagcgggattacaggcacctgccaccacgcctgaataactttttatttttagtagagacgggctttcaccatgttggccagactggtctctaactgacctcaattgatcttcccacctcaacctcccaaagtcctgggattacaggcatgagccaccgtgcccagccactaatatttaatattttaaaatctttacagaacagcttttacttctgacatgtcattaatctagtttgatactgttttctctaacatcttgcaaagatgttttctctaacatcttgcaaagttttaactggaagacacaccttgcggcacatgaggcagtaaaaaatgaaaaagacattacgaacaagaaaaattctttaaaattgctattaagtttggtgttacataacattattctggataattttttatcagcactcttaaaatatacacaaattgataaaagatgagttttgttaatgtttttattattgccctttatatgtatactgtgttttactaagctatctagattgagaagaaattacgattaaatggtaattgtccttaagtcagaactttgagtatggctgattgtgataggatcactgtgagtagagttgatactgctgttctttttctgaatctgaagacagttcattgttgattctctcaagaatgccaaaaaacctttcatgtgacatattgacctcaattcctctgtgatactgcttcaaaatacattgtgttgaagatttttaaggtaataaaagatacatattttcaatataatttatcttttggcttatctatcctggactttaagtagaagcctgttgacattggaatagtctgttcaaagttgggatttattatatagcacaaatttacaattttcacattgtacaagctggtttaaagaaattaagtgatggagcctatatgcaaacccaagtccaatattaattaagttaccccacagttgcttctgtcttcctgcagtttgtataaaagataaaacctctcacatggcatatgtatttatactacacatagaaaatataattaggcaataagctaaaatactactttgtaataaactgtgtagcatactgtttaagagtaagtactggtaactttaattttgttgataggtttttgaaataacctgttatagccgggcgcggttgctcacgcttgtaatcccagcattttgggaggccaaggcaggcgaatcacctgaggtcaggagtttgagaccagcctagccaacatggtgaaaccccgtgtctactaaaaatacaaaaaaattagccagacatggtggcacacgtctgtaatcctagctattcaggaggctgaggcaggagaatcgcttgatcaggagggaggtggaggttgcagtgagccaagatctcaccactgtactccagcctgggcaacagagtgagactccatctcaaaaaaaaaaaaaaaatattaacctgttataatttgaatatttctgcaaagatagattgtaatggttttcatttcttggtttctcctattttctctatttctttcttaatgaacgccacaggtcagaagtatgagtgtgccaagagatggaatgtacactgtgtgaccacacagtggttttttgacagtattgagaaaggtttttgtcaggatgaatccatatacaagacagaacctagaccagaagcaaagactatgcccaattcttcaactcctaccagccagatcaacacaattgatagtgagtctcattgagattaaaataattattctgaagacagtcatatttctatgtaataatcagtatgttaataggatcactgagatagggaatttctttttcttgtttgctgtgcttctaggcataattgtataatagtcaaattgtataaaaagttagcactgaactgttcgtaattttcttttagaatgaatgaatgctgtcttttatactctgttgtaatgcaaaagatgatcaaagaaattaagaacaatggtagctgggggcttaagataaaagtattaatcttttaaacattacatgcatatattaatctttccttaatttacagttttgctgcagttatagatcatctgtatttgtataaaaattaaaaccatttctattttgtaggtgtcgtgttggcaaaatgtttaaaatattttttcaaatgtaagcttcttggaccttaaagtcagcaacttcagatttttatgggaaacaagacactattaagaaaatgtgttaaatctattttcatttaaataagataggaggcttaattaatttcattttccctttttatactttgccactaagatttcagtaaacacccctgaatcttactttggaagttgtttattgccctatatttgtaagaaaagttaatccatagacaatatgtaatcatgattattttatctcccataaatttatacgttttcaaaatatgtaggtcgtactctttcagatgtcagcaatatttccaacataaatgcaagttgcgtaagtgaatcaatatgtaattcacttaacagcaaactggagcctacacttgaaaatctagaaaatctggatgtcagtgcatttcaagcacctgaagatttattagatggttgtcgggtacgtctttattatataatacatgcagtagatgatatacattagcatttcctagcctgactttgaagacccttcagagttgggcttgctccttactatctatgtaaaccctccactctagctaagtagatgcacttactagaccatgtccatcctttggctgcgagagtccctctgcctgcaaggtatcttcctctgttatcttttaaaagttcatttcaggttttaactcttctctgaaccctcctaactacattaatcttttcatctgctatatttcgagagcacttagtttctgaacaacttattggattttttttttttaatttttttgagttagggtctcactctgttgcccaggctgggatgcagtggcacaatcataacttcctgtaaccttgaactcctgggcatcagccacccctcagtctcccgagcagttagaactacaggcatgtgccactacacctggctaatttttaaaatttttttgtagagacaaggtctcactatgttgcccaggtttggactttaaactatcatccaagtgtttacagtgtattagacactgtgctaatcattttatgtgtgttaatatatatataaaatcgcatttaagtcccacaaataactctaaaatggatattatcttgagggtaagacttagagaattaaaattcttgttcagagtcacacagagagacattaagtggccagttatctactccaaagtctgtattcctcaccattagagccactgctttgtttggtatttcttgggttatttagttttttagtatatgaataactgtcttataagtttgttgatggaaacagcatatgctatactttttccgctgtcttagattggaatacttaatgtattcctatttgtagaatgacttggctgtgcactaattttcacagagtagcaaaaatttaaccctaccttattgttaagaagggaaattggagctgggcttggtggctcatgcctgtaatcccagcacttttgggaggccaaggtgggcagatacctgaggtcaggagttggagaccagcctggccaacatggtgaaaccctgtctctactaaaaatacaaaaaaaattagctgggcgttgtggcaggcccctgtaatcccagctgcttgggaggctgaggtaggagaatcacttgaacccaggaggcggaggttacagtgagccgagattgcgccattgcactccggcctggtcaacaagagtgaaactccatctcaaaatttaaaaaaaaaaaaaaaaaaaaaaaaagggaaattcggcaaattaccttttttttttttaaacttgccaacttacaaaaggtgggttttttgtttttgttttgagacggagacttgctctgtcgcccaggctggagtgcagtggcgtgatctcagctcactgcaacatcttcctcttaggttcaagcgattctcctgcctcagcctcctaagtagttgggattacaggtgcatgctaatttttctatttttagtagaggtgagggtttcaccatattggccaggctggtcttgaacttctgacctcaagcagtctgcccaccttggcctcccagagtgttgggattacaggcatgagccaccacacctggctcagaggtgttttgtatgatgttttatcctagactactaattctagatatagcttttaattatttcttacatatagaaagtatatgattccaaatatttgttaaaatatattctagtaatgggggtgatttaatttggggtataaatgcagtttggagtagatttgtcatacttaaatttttttaagggcaccttatgtaaaatagaggtaaaatgattttatattgattaaattggtttaaatatatatatactgatagctaaaaataaattactgcatacatgttatcctcaaagcattgtgttcagttctttgacttatatatattttttgttcagtcaactctgtgagtaaggtaacatcaatttataggtaagaaaattgatttaaagagcgtaagcaacttgcctattgtcgttaatcataggcagctggaaaaaacaacccctccccccgccccccacacacacacaatttaagcccaggtgttcagaattcagacagttaactacagtttacttttataattactttaaaatttacaagtaagcttcacagttaaagaagttacctgcattttaggaattggtatgcactaatatttagaagatgttggactctggcttctattttctttatagccacaaaatacttatcaagtatctactgtgaaagataatgctgtatgagattgtaaagagtgattaaaaactcaaagttgcagaactgttaaaaaatcaaaagtttcagaatgtatttattcatatatcttaaatgtacacaagttgtcttatttatacacagtggatttagatatatatttttagtttttttctattgagagaaagcatgttatgtatattaaatattttctttcttgcagatatatctttgcggttttagtggcagaaagctagataaactgagaagacttattaacagtggaggtggagttcgttttaaccagctaaatgaagatgtaactcatgttattgtgggagattatgatgatgaattgaagcagttttggaataaatcagcccacaggtttttttcgtttttaattcaaagcaatttctactacataatttttcttaaaattgcatatccacgcagttctggaaactgcatgacaagtgggatgatggtctttatagcttgcactaatacataactatgtgctatttttgtaggcctcatgtagtgggagcaaagtggttgctagagtgtttcagtaaaggttatatgctttctgaagaaccatatatccatgctaattaccagccagtggaaattccagtttcacataagcctgaaagtaaagcagctcttttaaaaaagaagaacagcagcttctctaagaaagactttgctcctagtgaaaagcatgagcaagctgatgaagatctgctctctcaatatgaaaatggtagctccacagtaggtaagaaatgcttgattagtatttgtagttagtaagaaatattttagtagcctaatacgtacatatgtgatttctgccaagttttctagattttaagttaaattaacctttttctttccttaaaattttcctcataactttttttctgagcaggcaagacaagagggtcctgaaccctttaaccctctctcctgtctccagctaactagctctattttgatttgttatatatacaggcattgcttggtttgtgtgtgagtttgtaatatcatgagccttttattaaaaccttgtaacaaatacctcttactggattattgtggtctttaatgcatgaaactgtactgtggactaccacctcagtatgtactcttatcatgtagtaaggtaaattgccagtgaagcattataaacatcattacttcttttttattaaaaaaaagcctttataaaatacctaatatagccaaaaatatatacatttaagtaaatttaatgtgtatcataacttaaaatctgaagttaatcagaattttaatctacctcgaataaaacaagaaccttagaaaactttttttttttttgaagcaggatttcgctcttgttgcgcaggctggagtgtagtggcatgatctcagctcactgcaacctctgcctcccaggttcaagtgattctttctgcctcagcctcccaagtagctgggattacaggcatgcgccaccacccctggctaattttgtatttttagtagagatggggtttctcagtgttggccaggctggtcttgaactcccgacctcaggtgatccacccgccttggcctcccaaagtgctgggattacgggcgtgagccactgagcccagcctaaaatactttaatgatcacaactagccctgctccctctctccactcatcaacatactcagcttatgtgattttgtctagtattttcattatcttttaacatcttacaattaggcgttattatgcttttatatggtcagtatttgtttcatttactaacacgtttaactgtttctttgctctccccagttctttttacatctgagacctctcttttggaatcattttctttcttcctaaaacaatatcctttagaaactcctttagtttctctaagactcttcggctgggtatacagttctagacagtttctttaagcacagagatattgtttcattgtcatctatttccctgactgctggataggaggtcagatatcagtctgtcattcctttacagataatctgtctttatcctctggctgtttttaagatagtcttccttttggtttttgtgtcctagagctttaccatttatttgtcctgcttgagattcactgtgccttctgaatctgagaattagtagattttttgctttttgttaggtcaagaaatgtttattatctctttgaatattgcctctcccccattctctatattctcttaactcccatttgctttgcatataggtcacttaacctgtccttatcttccatctttttgtctttctgtgatttattatgtgtaattccttcagatttttttccagatcacgaatcatctcttccgctattgcctaatctgttttacccatccattaaattttctgttttaataattaatttttcaattcctagaagttttagctttttaaatagtctgtcatttatttttttacttttaaaaatagagatggggtgctactatgttacccaggctggtcttgaagcacctcagcctcccaaagtgctgggattgcaggtgtgagccaccacacccagccaagtctgtcattttgtatttgtattttttgttctttatttcttaaaacacattaaacctatcaaaacatctgtgaattgttctgttggctgttgtttatggtgcctggttttcttgtgttttgtgatttttattgtgaacttgtacttactaggactctaggaattctaagaaacttggggtaggggtttgttaccccagaaaaggttcatgtttgggtctgctaggtgcctaggagtttacaaactcaatatgcctttaagttggtgtattggctggaggtttcttagacctccagctatatgaatttatacccaaacctactttgaggaccagcctctgatgaacagattcttaggagagatgttgtttccccttgacacaaagccagtgttcttgacctcttcctttacagggcagatttgttgttggttggttggttagttttggtctgtttactaaagatatgtctcttcatgggttctgggcttgttctctcagggtatactctccttcacctctaagttttatgaaaccaaaggattggctcctatctcttgtgtgatacctttacattccaagggtctgggttactgcacagatatttaatagattttgactaaccattagctttagtaactacttaatgttctggatttagtaaccactttagtggtctggattttaatattttatcctgtattttgaagtgtttttagtgagagtgtttcaaagatcctagcccaccatatttctagagagggaattcctagcattccttttttatttacactatttccgtactacaaaattgacttttctcaaaccatttacttatgctttagtattgtatcacatcaggaaatcatcttgattttccaggatgctgtggtataactgaaagtgatttttttttttttttttggagacagggtctcactccatcactgaggatggagtgtagtgtcacaagcttggatcactgcaacctcctcctcccgagttcacgcaattctcttccctcagcctccttagtagttgggagtacaggtgtgcaccaccacgcccagctaatttttgtatttttagtagagatggggtttcaccatgttggccaggttggtctcaaactcctggcctcatgtgatcctcctgtcttagcctcccagaatgttgggattacaggcttgagccactgcacccagccagcaattttacatactatccttcagccaagggtacttggtgtagggcaggtgattagtttcttaaaccttcctaagacagctagtggtttactgactttataaggattaagtgatggtaaatcttagtggatcaccaagcatcttagaaagtctataataaagtattttataattaattcttaaaatggcttttgatttaagggagttttttgttttttttttgagatgcagtcttgctctgtcaccaggctggagtgcagtggcgtggtcttggctcactgcaacctctgccttctgggttcaagtgattctcctgcctcagcctcccaagtagctgggattacaggcacgtgccaccatgcccagctaatttttctatttttagtagagatggggtttctccatgttggccaggctgctcttgaactcctgaccttgtgatccacccacctcagcctcccaaagtgctgggattacaggcatgagccaccgcgcccggccctaggggagctttttgaatgataggtttattatgtagtatctcttaggcttttgggtgcggtctgtttgaaaagagatcctactgctaaaataaacggaaagaactgctgtagaacatgttagtttattatgagtctcttaataacttcagagttttactgatggtttataagaacttagtatttctactttgtttttatagtagtagtctaaaattctactggatttcttcctccttcccatcttaccaacaacatatagacgtcgaaaaaagttatttttttctcctagatgtgactgcaaaataattgtacttgcaaaaaataagaaggtttttacttataaaacaaactttacattttaacaaaactgtttaaaaaactttccggaatgttttatagtattgcctcacctttaattccatctaagcatattcattcccatgagtatatctgtaaattataagtatactattaccctttattccttatattatgaaaccaagggtcaaagagactataaaactagaacccagctctcctgacttactgaccagtaaactccctagacaaaactatgcttccttagtgcgaataagtacaattttaatacttatgtttagtaggagtcataagttcctaatatatattgcagtgtacttaatttacaagttcctaatgtatattacaatttacttaaaaatgaaaatgctagtgtctgttggagatgaggatagaagtacgaagatggcactataacatggtggtgtgaactctggagttagacagactttggtttgtatctcatttctgccacttaactgtgtgaccttaggcaagttacataacctcttcaagcctgagactccttttgtacaaaagggatgtactgatagtatcagcctcacagttagcattatgtgagcattacatgcatttgtaaagcacttagtcacagtgcttatataaatgaaagagtgattcttggatagcttccagccttgttggaatcacatagcagggcaaactttttctctaaaggagtagacaataaatattttaggatttgccagccacttccttatagttatttccatgttaacatgttccatgttaaggacttgacagttataccatttagacttgttaatttttttcttaatgatagtttcttaattttatggtgaatcatctaaaccagttttggaactaagtcctgttggagctatataattttaaactaattcaagtttccattatactaggaatacctagaactaacatgattgctcttgtccttcccaatggatgatggtaatactgataaggactcttggtaaccccgaagacggggtgaatccatatccctttattatacacgtaagctttagttttgtaagtatggtcaaaattatcagattccatgttacgttaatatccttgctaggaagtaaactgtataaggtaaattgttggttagaaaacatttacttttctctttcagttgaggctaagacgtctgaagccaggccctttaatgattctactcatgctgagcccttgaatgattctactcacatttctttgcaagaagaaaaccagtcttctgtcagtcattgtgtccctgatgtttctacaattactgaagaaggcttatttagccaaaagagtttccttgttttgggttttagtaatgaaaatgaatctaacatcgcaaacatcataaaagaaaatgctgggaaaatcatgtcccttctgagcagaactgttgcggattatgctgtggttcctctgctggggtgtgaagtggaagccactgtgggagaagttgttacaaatacatggctggtaagacaacactagtggttgaaataaagtatcgaaggatatctgaatgccaagaaggttaatgtttatttcttagacagttcagttacagtaaatcaatgcttggacttgaacactcttgattttgcttttagcaagggaaattcaaaattaaatgtgcaagcttcttggcctaatcccgatacagtagagattactgtttcccagggccacagcagcaacattccttcttaggaggtcactctagggtcatctcatactatttgtcttgttttctcataaccaaagcatcactggtaatttcactgttgatttttttttttttaacattccaagaattatgagaaaaatagtataaactaatacattagaaggaatgaaatttaaagcaacattcagtaactctaataatagatcttaccgattttaatagcctaatgtaattagtcgatgtatgtatatgtgtgtatgtatatatatactctaacattatgatatgaaatgtattgagaatgagcatacacaagtttgtattaaagtaaaatttcttcttatcaaaactaaattattgcttctgtacctgaaccagtgttaaccactggttgcttatttcaggttggctttactatttcttttgtttttaaaaggttacttgcatagactatcagactttgtttgatccaaagtcgaatcctctcttcacaccagttccagtaatgacaggaatgactcctttagaggattgtgttatttcatttagccagtgtgctggagcagaaaaagagtctttaacattcctagcaaacctccttggagcaaggtatgtaatatttttaatgcacctgttgtattggtgtatctttttatttattttgacttcttggagagcattcaaattagaatttggttgggtgtctttattatatttatgagtgttatgtggttccttctccactcccactgcttcacttgactagccttaaaaaaaaaaagtgcctctgttgtccaaagatgaaaacttaggtatcattagaggtaataactgcagtgggtccaaacacatgaaatagtgtttaagttgtgacttcataatgacaccaaataaagtaaggtaattggtcatctttgaaagatgctagagaaccagtccattactttgaaagctgacaaaaggaaaggatcaaggaattaccttgcatttcctgtgcagtttgcatcagggtaacatgatagtggatacgacaaagtttccctttataaagatgtttcaacaaacaaataaataaataaggaatgataagactgtaacccctaatgaatgaaagaatctaggcattgaacatcaatagtcgatcacacaataaagggacaagacatgatgtgccttcttacaaagaatacaccaccactttgaagtagtcttgccaaaataatcaaacctcaatctgatgatgcttctagatccaattcccaatttataggaaatgcaaacagcagaataacacgttaaactatactacagtgatataatcagcaagacccagactttagtacaactctggcataaatgatccagtgtcttcaatgaatatatattaagggcatggaaaagaaggtaggaacctataagctaaaagacttgaaaaagcaaaagcctaaatgtagtctttaaagttgccattatttgattatagaaaagtaaagaagtgattactataagtatccaaataggccaagcacagtggctcacacctgtaatcccagcactcgggaggctaaaagattgcttgagctcaggagttcaagaccagcctgtacaacatagtgagacctcgtctctatttaaaaaataataaaaaaaaatgagccaggcatggtggcatgtgcctatggtcccagctactcgggaggctaaggcaggaggattacttgagcccaggagaccagggctgcagtgagctatgatcacacaactatactccagccagggcaacaaaatgagatcctgtctccaaaaaaaagcccaaatagtggctactattaagaagggagggaagggggtttatatggcatgttggagaggttctggggtagttagcaagattctgtcttctgacctgggtggtggacttaagggtttcaccttataataattcgtatagctgtatatttctttttttgctgttttctgtttgaattatatgaaataataaaattcttttaaaactgaaattgtggaagataataacatacatgatgacagactccactggatacagctaaagctgtactcagcaggaaagtcatgcaaattctgaaatagaataattgggactagccctaacagttattaaaatatattttgtggccaggtctggtggttcatgcctgtaatcctagcactttgagaggccgtggcaggaggccaagttcaacaccagcctggacaatatactgagaccctgtctttacaaaaaattttaaaaatgagccaggcaatgtagcataaatctgtagtctcagttatttgggaggctgaggtgggaggattgtttgagcctgggaggtcaaggctgcagtgagtcacagtggcgccactgtactctagcctggaggacagagcaagaccctgtctcagaaaacaaacaaacaaatatatattttgtgaaacttcactaaataacagtgtggttacgtgtagcagaaagtttaattaatggacagcaaatgtagcaggagacccaaatgtaaaaaggaatttacgatacaagtgacatttcaaatatatataaggaagacatggcttattcaataaataggattcattaaagttggagcagtatctcatatctaaataagtactgaatggattggtgggttaaatgtaaaaaatgaaattataaaagtactaagataaacacaaaacatagaaaaaaaaagtgctaggaaacatgggaaatttaaaaatctgaaaagttgggaactagaacataaaacccagaagtcataaaagaaatcacggaattctgttcaatctcaagtcgtagacttctttttctgccccgtattctctgtgtttaatatcctatgatcttgaggcacttaatttctctgtattttttcccatgtctatacttaaatattgagaggatcaaatgagataatatgtagaaatgctttggaaagttgtagtaggttaaaaaataataataatgttatttatacactttgctcctgtcattttttctgtgccttcttttgggaggaaaggacaaggtgtgggggtgataactaattaaggaggtaattttggctgtgtgaggtggttcacgcctgtaatcccaactttaggaggctgaggcaggaggatcacttgagctcaggagttcgagaccaggctaggcaacattgtgaaaccccatctctacaaaaaatacaaaaattagccaggtgtggtggtgtacacctgtagtcttaggtactggggaggctgaggtgggaggatggcttgagcctgggaggcggaggttgcagtgagctgtgattgtgccactgcactccagtctggacaacatagcaagaccctgtctcaaaaggatttttgctgtctgttctttgcatgtctaattatgtttttataaaaagtttgttacagcaatacatttttaccctagagtaagcatttgtaaggggattagcttaatttcagatagagtaaaccaacttttaatcagtatttttttttatacttacatgatctctaaccacactgttgtgttggaaattttgttagttttgcgggttaattgtatatgtgaccatttccacttctttaaacataaatttcagtgttcaagaatactttgttcgcaaatccaatgcaaagaaaggcatgtttgccagtactcatcttatactgaaagaacgtggtggctctaaatatgaagctgcaaagaagtggaatttacctgccgttactatagcttggctgttggagactgctagaacgggaaagagagcagacgaaagccattttctgattgaaaattcaactaaagaaggttaatacttttattctgttcttttatatatatttacaactagatggtttctgggatataaatgtgccaatgcttgtgtttaggaagggtcattgatttttgcttttcacattgggtgcagtgagggtctcagtgttcgaagtctacagatgtaagcttggctcctatttactgttgattctttctatggctcatagtaacacactatataattaacatgctatctctcctcttatctttgggcttctgcatgtttcctgtagaccacctcacagttgcctgctcttcctgcttatctttcagttctcagctaagataccactttccctgggaagcctttcattttttctttttaattattattacactttaagttctggggtacatgtgcacaatatgcgggtttgttacatatgtatacatgtgtcatgttggtttgctgcacccattaattcgtcatttacattaggtatttctcctaatactatccctcccccatccccccatcctacgacaggccccggtgtgtgatgttccctgccctgtgtctgttcaattcccatctatgagtgagaacatgcggtgtttggttttctgtccttgtgatagtttcctcagaatgatggtttccagcttcatccatgtcccgacaaaggacatgaattcatccttttttctggctgcatagtattccatggtgtatatgtgccacattttcttaatccagtctatcattgatagacatttgggttggttccaagtctttgctattgtgaatagtgctgcaataaacatatgtgtacatgtgtctttatagtagcatgatttgtaatcctttgggtatatacccagtaatgggatcgctgggtcaaatggtatttctagttctagatctttgaggaatcgccacactgtcttgggaagcattcttgactcaccaaggatggcctttgtcttggtataatgttttttgtttcaccatgacactctgtatcatcccttttatctcttacctcagtgttataatggttgtttattttgtgtcttcctgctaaatttaaagttccagaaaggcagtgaacatgcatgtcttgtgaattctgtatttcccatgtctaacactaggcctggcatggagtagctatctaataaggttttttgttaaatgttgaaaaaaggtggaaggcataggtggaagaatacagtaccctctcttgtaagataatagcatccatgggcaaacttcagggacatatcagcagcttgggaatacctctcagagtcattacttattttgccagacagactggtaattttatgactgaggctaagtgatgttcaggtcatattaaaatttgattaaggactttccaaaactagactgtagttaactctgagtacctgtaattgagatttttctttttactctgtcattgactagaaagacattcactgataacaatttttggcaaataggcttattgagacatagcaagatgaaacaggaaatctattattattttttcagttaatgtgcttgtctaactcaacatatatttaatgcataatctggtttgtttcttggaaagtaggtatataattttgtgatttaaagtgtacctgagaattgacatgaaaactaacagattaggatgccgaggtagatggatctcttgagcccaggagttatgcaagaaagaaaggaaagaaaacagtataaaatattacttcttgtgtaccgggaaaaagtgggcattagtggctcatatttgtttcttttcattttaaatctctagaacgaagtttggaaacagaaataacaaatggaatcaatctaaattcagatactgcagagcatcctggcacacgcctgcaaactcacagaaaaaccgtcgttacacctttagatatgaaccgctttcagagtaaagctttccgtgctgtggtctcacaacatgccagacaggtcgcagcctccccagcagtaggacaaccacttcagaaggagccctcgttacacctggatacaccatcaaaattcctgtccaaggacaaactcttcaagccttcctttgatgtgaaggtaaggtttataggcagtggtcccagagttaacagttttaccgtttataaagttaaagcaccaaatttggcatcacctctgaagtgtagtaataaattttccagagacattggcaagtagatttatgttactgagtttgaacgttttgagtcccagcatacatttagggttaaggtaacagctatagataaatatggtgtgaaattaggacatctgggttcaagtactggatcgatcttgaactgtatgactaggccaatcatttaacatatctgagcttcagtttgttttttcatacaaagaagataatatttgctctgaaaattcatagattataaagatcaaatgatgaaatcactttataaactataaaatgtaaacacactgatactttatatattggttctcagagtacacccgggatttgccttctgaaaatgtgtgtatatcaccttacttgaattgtttcctgtaaagacatgagttaagtctgtgttttagtttgatctcgtgagcattgtagtatggctccctttctgaaaaatgcatttgtaaatcaggggctaatgtaatcttccaaataattttctttgattttccaaaactgattttcatcattatttctttagtagcttttgacctcttaagtggctgttcaaacccactgtctatgatttctttatccacgaacctttgaagaattattttactcattcacgtgttgatatttttgcttgtagggtatttagaagcaatattttaataatttttattgtgttttggagtggacttactaaaaagtttatagattattcatattcagaaaataaatattaattgatatccaggacagttttccccaagctaatttatgcctttatttttggtcagaattccagtgacgcacattaaaaaaagtgtgtctttactattaaactcaaaattctaagttttcacatgaaatctcttctgaggtaacattttgtactgtgattaatactcaggtccatatcccttaagacatagaggaaaatcagtcttgagaactgtgaggtgtaggatcaagcctcttctttgcctcctactgccttttaaaagcaagtcaacctctttcggcttcattattctcatctataaaatccagatgatctctaaagtgtcatagctcacagactctctgaagagcaaatgtaataatattggtgggcaagaaaatagtagagatattttcagtcattgagaccattcttatatagatacattgcaataaaagttttgcagtggaaagctgatagttctgaatagcctcaatacaaaaaacacattaaagattttattgtttagagtcatagtttattgagcagtgtttttcctcttttttctttcttttttgatggcacataaataatgcttcatcttataatcttataagcattataatgcttcatctataatcttataatcagatgataatcttatcatcttcaaactgatataatatggtatgttgaattctttacttaaaacatgaaagggcccatggaataatcacaaaattgaccatctattaggcctcacccttgcccccctcaaaaaaactcaccacttatttaaacttaatttttaattaatatacatcagagcagtacaataaatatactgctaatgaactatcagggttaatcattgagaagccactatacacgttcagatagagaccatggtcagtactgtaaacccttccttgtggctccatcgctgcttcctccctaaagtatactcctgacttctaataactatagttttgttatgcttgtttttgacttttaaatatgtggaatcatagtatgtattcttttgagtctgttttttttttattgttctttaacccttatttagatttgtctgttttgctgcatgcaaatatagttcatttatttattcctttgtatggatatacagaatttacatttccagtgtactgttgatgggcatttagttggttactagttttttgcccttacaaaataattttactgtgaacattcttgtgcgtgtctcttggagtctatgtgtgtgtgttactatgtggtatatacctggaagtgaaattgttgggttatatttcagcttcagtagagaatgacaaattttttgccaaagtgattataccagttcatgcttccaccagtagtgtgttgagtgtacccagtgttcctcatctttgctgatacttgctattataagttgttttatttcactttttacttcaaaataatttctaacttacaaaaagttgcaaaataaaagtggtacaaggggctgggcgtggtggctcacacctgtaatcccagcattttgggaggctgaggtgggagcctcacttgagaccaggagttctggaccagtctaggcaatatagcgagaccgccatctctaacaaattttttttttaattagctgggcttggtggagtgcacctatagtcctagaactcaggagggtgaggcagcaagatggcttgagcccaggagtttgaggctgcagtgagctatcatcctaccactgcactccagcctgagtgacagagcaagaccctgtctcaaaaagaaataagtacaaggatggctggacatagtggctcatgcctgttatcccagcacattgaggctgaggtggatcacttgaggcaaggagttggacaccagcctgggcaacatggtgagaccccacatctacaaaaagttggaaaaattagctgggcatgatgatgcatacctcttcttacttaaatagtattctttattatttgtcagttttaaattatatttttgactcccactaattgcctgtatagaagatcttattctctttcccccttttctctcttctatttttcattgcatatttttttactttgtcaggagggaaaatatattttttcaacccacagaccccaccctcgttttggtcttaactctacaatcgaatatatgaaatgtgtactcttctttttgaagcttacctgtcacttttggtaggatgaagttcattttctagtaggttcctcaggaatctgtgtgtacacacgtgtacagtattccttgagttctgcatgttcataacttttactgtggccttgcttcttctacaaattgtttggatgtactattcttagcttgcagttttttttcttgagtttcctgaaaatgctcttccactactgccttgctttgtatgtgttgtttttgaaaaaaaatctgatgccaatctaattaaattacttgtctttggaagttatttcatctttttgcctggaggtcatgtggatttttcttttatcttttatcttttttttttaagacagagtctcgctctgtcacccaggacccaggctagagtgcagtggcacaatctcagctcactgcaacctctgcctcctaggttcaagcgattctcctgcctcagcctcccgagtagctgggattacaggcatgcgccaccatgcccggctaatttttgtatttttagtagagatggggttttgccatgttggccaggctgaccttgaactcctgatatcaagtgatctgcctgccttggcctctgaaagtgctgggattacaggcatgagccacaacacctggccttttcttttatctttgaactcaaatagtttcacgaggatgtctagatgttaagaattctcaatcatttgaaatcagttttccacaatacatggtaggttttaaaatttgattcttttcaaatttttggtctgagagatgagaagaatggagttgccagtccaaactgagttgaacagaacaggttgggattggagcctaaagatctagagttcacatgttagacacattaagtttgagatgcctattagatatccaagtagttgttaaataggcagttgcaaataacgctggaagtttgaggaatggtttgggctggagataaaaatttggggttctgagtttgtaggtaatgtgtaaagccatgtgagaatagatgccaagagagtaggagaaggcaaagaaaggaaaaaggttttgttttgttttgttgtgtttaagacaaggtctcgctgtgtcgtccaggctggagtgtagtggcatgatcacagcccattatagccttgacctctggactcaagcaatacttccacctctgccttcaaagcaactaggacttcaggtgcatgtcaccacacctggctaatttttaatttttttgtagatacggggatcttaccacattgctcagactggccttaaattcctggacttgagcaatcctcctgccttggcctcccaaagtgttggggttataggtgtgagccaccacgtccagccaaagaaaagagctctaagcaacaccttgaggtgctcacctttagaggaggaaccagcaaaggagactgagaaggagctataagagaagaggaaagcctagagcttatttcaaagagccaagtatttcaaagagggaggaggggttaactatgtccaggactgctctaagataaagaaaggtgagaatagaaaattggccagtggattgagcattatgaaggtcaatggcgtcatcataacaataagggttttggtggcatgatggaggtggaagctggtgtgggttcataaagaaatgagaagaatcggagacattgagtgtaaacaacgatttttgaaggaatcttgccataaaggggagccaagaaatggagttgtagttatggggcaaagtagggtcaaaagaaggttgttttctttttaaggtggaagaaatagccaggctcagtggtgcatgcccataatcccagcactttgggagcccaagacgggaggatcacttgagtccaggatttcaagacaaatctgggcaacatggcaagaccctgtctctacaaaatacacaaaaattagctgggtgtggtggtgcacgtctgtagccccagctagttggtaggcggaggcaggaggattgcttgagtccaggagatagaggacgcagtgggcagtgatcatgccgctgtactccagcctgggtgacaaactgagaccctgtctcaaaaaaagaagaagaaataactatatgccagtgtaactgccattagagagccaattgatgatgcagatgagagaaggaagacttgcaggaggcttgagtctgagaggcattgggatctacttcttaagtagaggaaggtactagtggcacgtgtgctgaaggcagatagatgtggtatgggagcttctgatttttatataaggaatcctctaaaatgctttgaagaaattttaaaaagtttagcatatagaaagacttaccatgttcttgcaaaatagatttaaacattgtcaagatctataaaggtgtattaatctgtttgcacattgctataaagaactaccccagaccgagtaatttattcttatttttatttttttattttgagatggagtcttgctcttgtcacccaggctgaagtgcggtggcatgatctcggctcactgcaacctccgcctcctgggttcaagcaattctgctgcctcagcttcccaagtaactgggattacaggcgcctacccccacacccggctaatttttgtattttcagtagagacggggtttcactgtgttgggcaggctggtctcaaactcctgacctcaagtgatccacccacctcagcctcccaaaatgctgggattacaggcgcgagccaccacgtccaactttataaagaaaagaggtttaattgactcagttccacaggctgtacaggaagcaccactggggaggcctcaggaaaattacaatcacggtcgaaaatgaaggggaagtgagcacgtctttcatggctggagaaggaggaaaagatagcggggggagatgccacacacttttaaacaactggatatcagccaggcgcagtggctcacgcctgtaatcccagcactttgggaggccaaggtgggtggatcacctgaggtcaggagttcaagaccagcctggccaatatggcgaaaccccatctctactaaaaatataaaaatgagccgggtgtgatggcatatgcctgtaatcccagctactcgagagactgaggcaagagaatcacttgaaccaggaggcagagattgcattgcaccaaggtcgcgccacagcccgggcaacagagtgagactccatctcaaaccagatatcatgagaactcactcattatcacaagaacagcaagggggaaatccgcccccataatccagtcaactgccaccaggctcctcctccatcattggggattacagttcaacatgagatttgagtggggacacaaatccaaaccatatcaaaaggtaatgtaggtcctagaaaaaaatgcaagcagaaacaatattaaaaaaaatctgaaaagtataattgcaggtaggcagtagccctaccgtttattaaaacctcctataaagttgcagtagttaaaacagtgtggtgtcacgtgaataatcaagttagtgtataagattatactccacaaataggggaatttattatgtaataaaggtggcattcaaattggacaattaggtagccatctgaaaatacgtttgtaattaaagctcacactttacatcagaatactttttagatgatcaacttttggggtttttcttgaaataggatctcactttatcacttaggctggagttcagtggcatcatcgtggctcactgcagctttgacctcctgggctcaagcagtcctcccacctcagcctctggagtaactcagactagaggtacatgacactgtgcccagctaattgtattttttggagaggtagagtctcaccatgttgctcaggctggtctagaactcctgggctcaggcagttctgccttggcctcccaaagtgttggaattacaagcgtgaacaaccacacccagcctagatgatcagatttaaacataagaaatgaagccataaaaattcccaaacatgtcatgaatttgtttctaaaataatcctagtgtggggaaggcctaactataacatacactccaaaagaaatagaagattcgtatgaatttgacagcattaaaaattctctaactgggtgtgatggcacatacctatagtcccagctgacaagggaggattgcttgagccctggaggcagaggttgcagtgaactaagattgagccacttcagtccgttctgggcaagagagcaagaccccgtctcaaaaaacaaaaaaattacagcgagtcaccgtgactcacacctgtaatcccagcactttgggaggccaaggcgagaggattgcttgagcctaggagtttgagaccagcctgggaaagacggcaagaccctgtctctatgaaaaattttaaaattagctgagcacagggttgtgcatctggagtcccagctacctgggaggctgaggtgagaggatccttgaatccaggagttagaagttacagtgacctataatcatgccactgtactccagcttgggtgacaaagcaggactccatctctgaaaaaaaaaaaaagctccatggcaaaaatttgacaaatgataaattgaaaataaatacgtgggtattatatcacagttgatacatgcacatataaattcatacaaatgaatataaaagtatattcatacaagcgaatatattaaaaaaaagactaacaacccagtagaaaaatgggcaaaggataggagcagatagttatcacaaaaaattagatataaatatacatatagccaggcgcggtggctcacgcctgttatcccagcactttgggagtcaaaggcggttggatgatgaggtcaggagtttgagatcagcttgagcaacatggtgaaaccctgtctctactaaaaatacgaaaaattagccaggcatggtggtgcatgcctgtagtcccagctactcgggaggctgaggcaggagaatcgcttgaacccaggaggcagaggttgcagtgagccgagatcgcgccattgtactccagcctgggtgacagagcgagactccgtctcaaaaatatatatatatatacacacacacacacatataaagatatttaacctcattcagtataaaagagtagaaaattaaagcatacagataaaattttttagtcttatcagattgtcaaaaaagaaaaatctgattactgtgatatcaagcacgtttggaaaacacacacactcatactttgctcatgaaaatgtcaacattggtagatacatgttggtcttgtttttttagtttttttaaaaagaaattgggtctaactgtgtttcccagactcgtctcaaaactcctggtcttgagctgtcttcttgcttcaacttctctggagtagctgagattactgacaggagccactgcactgggctggtagatacattttgcttaaaaggtttcctttactcttgtgtgtgcaaaatggtttgtgtacaaggttattcattgcatcattatacttgcaaaagactgttaaccgaaagcttatcagttgtacacaggttaaatacattctgatacatacatggaatactatacacatgcaaaagagaatgagcaagccatttggacaacagtagcttcctttcaggagggaactgttggtggctttagaacaggaatatattttgaacttttgaagatttttttttttttaattctcagctcattttgactttctaaccttccttataatccatttcttgattatatccgtcgttgcttatttgtttccttctgggtttttttggtttgttttgttttcaaattcaactctaagattcaggtaagagacaagcactgctgaaaatgtaagctagttagtctctttgaaccaatttgctggacagtatggaatttttgttcacagtatatggatttgattatagtttattctttttcttgttatttggaggaaaactagaggaagttaaactgtaatccattaattttgaggattctcccccttctctctctttacccctctctcctcctctttctttttcctgtcctattaacccatcttgcttctctctctctctcttcttttctccatctctctctctccttcatatgtataggatgcacttgcagccttggaaactccaggacgtcccagccaacagaaaaggaaaccgagtacgccactctcagaagttattgtcaaaaacttgcaacttgctttggcaaatagctctcgaaatgctgtcgctctttctgccagccctcaactgaaagaggcccagtcagagaaggtaggattagttctcttattaaaaggaagttttagataacatttcaaacaataatgactgatctgtttcttttattttccatggacaggaagaagccccaaagccacttcacaaagtagtggtatgtgttagtaaaaaactcagtaagaagcagagtgaactaaatgggatcgcagcctctctaggagcagattacaggtagttggcacatctttctgtttcatggtgatatgactgaaatttataaggaaacctaaagctattgtgagcatctacaagaatacatttattttgtttcatgcatctttatctacaaaatctctccagttgatttttaatttaccacatctgttgaaaatagcctctcacatatcaattcactcttatatgtatataatgtatattttttagggtatgcacaacaaatattggagagcctattttatgccactaactattctagaaacctgggatccatgaaggatcagtatagtctaaaagaatccctgtgttcaaggagtttagagtctattaatagtaatacatctggatctgagattaagtttatttttactagtgatttttcagattagagccctctgggagtagtactaagtactctggcagccctcctttattaagatagtcttttttgagcatgttttcattatctttttttttttttaaactttggagacttagattgtcagatttttcttcagtcaacctgacagcctaagctgaaaacagatctctagcacaaatggcatcagtatccagaattgagaatctcttacctatttcagccagtcctgagttgactgtactcctccactagctgtaatgcttgctttgttgataacttgtgttcagccattcatagatatcataagaatttgtttaacaaatgatgaaccattgcaggaatatgattagtttcatcttcccctttggtaactcttatttcagtttgttttctatttgataaagaaattaggacaggaaaatataggagtaaaattgatctgtaatacatataagcatcttagtgtttggtacatccatttgaaatagtgaagctcttctacggtatatttgtattacctattataaattgttaggtaatcttatctgttattatctaattacctattatgttacctattgccagttgctgagcattatctcgtttcattctcatagtagccctacaaggggtgtgtgtatatttttttttcctcaaaattgaatgtttccttgtttattctgttttgatgtagacatgatataagactttcaagggaacatataggatgtatgtttttatatgattttaaatgccagtcctctcagtataaaaaatagaatttattactgaaattcctaaacagaatttaaccattgcattgcattaaagtttatattaaatcttttcctgaaatggattggtaattgataaagggaagagccttataatatgcagaggttagatatttatatatgcatagagtaaagcagttctcaagtgaagttgttccaaatgttcccttccatcatctaggaccagactgtcccaaagagatcatcggatactgtcttctgtcttcagacagttaaacatgtaggcccgatctttgcaacaaatcagatgcagcatcttcattttattacaaatatttgtgtaacattccctctattaaaatgaatataaatataacctacctacttttataatttaaaaaagtagcagacagtatagcactctgtgatgcataggagaaatagaaggtgcataatatagaaaagatatatgttcagttatgtataatgcctaaggctgactacactagaaaacaatggagtattaatacgtttgtatacctatgtaaaggcaccacaaatccaacagtcccaaggctgagaccgatctggggactcagataccatgagtagcagtggtcttccatcaatttatacagtagtcacatttttgtaatattagtgtatattaaaactgcaaaaaaataacttgtttatatgtcgaacaggttctagactcaactaattataaacaacttttttttacatacgtgaatttgtcgggacattagaatatcatgcaagatatgacataattatatgtatgactgttccccagaatttccagcatcctgtaccttacccactgcatgctagtagcaccctccaacatacaaacacacattgtaacaaccaaaatcaccctcacaaatgtccaaaataacccctgaagtaacacttttgctgaaaccgctgatctagaccaagggtgtatgggctggttcatctgtttttgtaagtaaagttttattggaatacagcaatgccttttcacttacaaattgcctatgactgctttcacatacaagacaaaagttgagcagttgcaaaagagattgtttggcctgcaaagtctaaaatatttactatctggccttttaagaaaaaatttgccaaaccctgatgtaaaccatctacaaccactgacagtctgttcttgaatggcctctgaagactgaaactcatggtttccatattgtcatagtggagttgactggtaaaccaaattgattcaggcaaaaatactcctctgtttttctgaattatcttgataatataccactacgcagaaagggagacagttattctgagaactaacaaattaggcaaggtgtatttttattgttatgttttaggatacatggtcagtaggaaatagagatttttataatataacttaggaggcaatagtacttcttacttctttttcttaattcttttttttttttgagagggagttttgctcttgttgcccaggctggagtgcagtgacataatctcgactcaccacaacctccacctcctgggtttaagcgattctcctgcctcagcctcctgagtagctggtattacaggcatgcgccaccacacccggctaattttgtatttttagaagagatgtggtttctccatgttggtcgactggtctgaaactcccgacctcaggtgatccacctgccttggcctcccaaagtactggaattacaggcatgagccactgccactgcacccagcttcttaattcatttgtctatttaaaaagctcagagatattccttacttagaaaatggaaaatattaagtgtccctaaggataaaattctgtttattttggtgattgtatttagaaatataatttttacctaccctttggtttttacttgatgtttcccaggtcaagagaatattgaatagcggccgggcacggtggctcatgcgtgtaatcccagcactttgggagcgcaaggcgggtggatcacttgaagtcaggagttcgagaccactgcccaatatggtgaaaacccatctctactagaaatacaaaaattagctgggtgtggtggcgtacgcctataatcccagctgctcaggaggctgagataggagaattgcttgaacccgggaggtggagattgcagtgaaccaagattgtgccactgcattccagcctgggtgacagagtgagactctgtctcaaaaaaagagagaatattgaataggaagaattgggagatcatagcataatataatagttaagagcatggcttttgaagtcaaagttatctctatcatttactcattgagtatccttgaacagggtactgaaccatgtcccttagttcttttatctttaagattaatgtaataataccagtgttaggattgttgtgaggaatggatgagataatgatgtgtaaaatatatatagtctgttttggggcatacaatgaatagtgactgccagcaactggagggcaagttggatgctttgcaatttattaatttgaaatacctttatggttactgtaaaagtgatattctttataaaagaaaattgaaacaattcagaaaagcataaagaagaaagtaatattttaaaggatattcttctaaacctctctctgtatttatatacctacagatatatgcataaaatttgtccaaaaagatagagcctatcatcatttttttaactgtttttttcttgaggcggggtcttgctgtgttgcctgggctgaagtgcagtgtctgttcacaggggtgatcatagcacactacagcctcaaactcctggcctcaagtgtcctcctgcctcagcctcctgggtagctgggactataggcatgtatcacttggcttgagcctgtcattttaatggtcttgtttactctagtccgaaagttttgggaaggtcagaatattctgttcacagtaaataagaatcatcttaaactaatgaggatgtttctcttggttatttgtttttttgtattggttatttcaggtggagttttgatgaaacagtgactcatttcatctatcaagggcggccaaatgacactaatcgggagtataaatctgtaaaagaaagaggagtacacattgtttccgagcactggcttttagatgtaagcagtgcttttttcccccccatctctgttaattgaaaatgtatacaaacattatttcagagcactaactcaagagttttcactctcaatggaactagaagccagtttaatagtcttggttaactgtacacatttcagatctttggcatcaaaaacttaacatctttagtccttaaatacttaacaaatctttaatggatactctttctaattctccatttccttgtactaattaaaaatgtgatatgaatggaaagtttataattatttggggaaaatttaacatatcaatagagtttagatctgtgtttcttttttttcctgggtattctctggagggtaattgatacctttgcaaaagcacaggaatggtttcagattttatacttcagtggatatgacatttaaaacatgaggacaatctgtcatttgtatgatgcaaatttttcagtgtaaactacttttcaaaccagttttgtgaactttttgccatattacagtataatgtattgcttgtccttatcctacttaacatcatctattcattaagattttgtcagtcctgtcttaaagcacaccattgtattgcagtgtgcccaagagtgtaaacatcttcctgaatctctttatccacatacttataatcccaaaatgagcttggatatcagcgcagtgcaagatggccggctctgtaatagtcgactactctcagctgtgtcttcaacaaaggatgatgaggtaggagatatggatgatacatttaccccctcttaagctaaaggtataatcatatattgctatgaaaccttatacagtggcttggtttgagaatttataatttttctttttcaatagccagatcctttgattttagaagaaaatgatgtagacaatatggccaccaataataaagagtcagcaccatcaaatggaagtggaaagaatgactctaaaggaggtaaaatattttattttttaattaaaaaaattttttttgagacaaggtctcaattttttgtggagatggggtcttgtcatcttgcccacactggtctgaaactcctgggctgaaaggatcctcctgccttgtgagccactgcacccagctgtaaaatatgtttaaattactaaatacaagcaaagcatatattagaggattgatttgtggtcccatgctgatcattaagtgataatttgcaaagttttatgtagtttaagtgtaaagcttatgaaatttatgaaactaggtttttatggagttagtgtgatacagccctattccattaaaggtaggtgaagttggtgattttttaaaaatctagtctttggtccagttcttttgagtgattttcaaaaagttttcttatatgtacaatatattttaacatatccacatggttttaaagatacaaaaagacatatgaagagtttcttccacccttattctccagccccccagtgttattagttccttatgtatccttctagagctgctttatgcatatatagccgtaaatatgtttttcccccattaaaaaaaaacaaacaaacacataggctgggcatggtggctcgtgtctgtaatcccagcactttgggaggctgaggcaggcagatcacccaaggtcaggagtttgagatcagcctggccaacatagagaaactccgtctctactaaaaatacaaaaaattagccgggcatggtggttgcatgcctgtaattccagctactcgggaggctgaggcaggagaatcgcttgaactcgggaggcggaggttgcggtgagccgagatcatgccattgcactccagcctgggcaagaagagcaaaactcttgtctcaaaaaaaaaaaaaaaaaaaaacataaatggtggactactatacatgctatttcatacgctgatctttttgttaccttgggtagtgttttatatcagtagataactaggagcttctttagtctttttctttcttgcttttcttccttccttccctccctttccttcctgtcccccttcctctcctttccctcttcccttcctttccctttccttctttcttcccttttctttctttttgggcaactgtattgtattcattatgaatggtcccactttgtttaggcatccattcttaataggcatttaggttatttctactttcttgcttttataaatagtactgcagtgaataaccttatacatggatgtcttttaatagatttaatatgttctgttttccttactcattctaacctaccaaagctttccctatgacttacctatttggttagtctcactctgttcattccaaatgcatttatttaatacttactccagagtttaggctttaaagaaaaccaaaggtaaatacagttgtcttgtcccttggtatccatgtggcagtggttccgaggacttacctcaggtaccaaaatccacagatgcttaagttccttatgtataaaatgacataggatttgaatttaaccaatgcacatcctcctgtatactttaaatcatctctggattacttataatacctaatgcactgtaaatgttttgtaaatagttatattttattttttttactggtacttttaattgtgatatttttcatttttatgtctttaaaatatttctgatccatacttggttgaatccatgcatgcagaaccggtggatgtggagggctggatgtatgttgtggtctgtgttttcaagagcctttggggagtctgggcacggtggctcacacctgtaatctcagagctttgggaggcaaaggcaagaggattgcttgatgctaggggttccagatcagcctgggcaacatagtgagaccttgtctctacaaaaaatttaaaaaattagctgggcgtggtaatgtacacctgtagtgccagctactcaggttgctgaggctggaggatcacttgagcccaggagttagaggttataatgagctatgaccataccactgcagtccagcctgggccacagagcaagactctgtctctaaaaaattaaaagaatctttgggaaaaatcagacacatacacaaatgactataagacatctcagagtgtagtacataccatgagagtcagaagcaggcagggagctttacagagggataatcactacaggtcttgatgaaatgtctttgaagggggccaggcacggtggctcatgcctgtaatcctagcactttgggaggctgaggtgggcagatcacctgaggtcaggagttcaagaccagcctagccaacgtggcgaaaccgcgtctctactaaaaaatacaaaaattagcccggcatggtgatgggcacctgtaatcccagctacttgagaggctgaggcagggagaattgcttgaacctgggaggtggaggttgcagtgagccgaggtcgcaccactgtccagcctgggcgacagtgctagactatcaccaaaaaaaaaaaaaaaaaagtatttgaagggcttcctagttatttcatatacagtgcttgtggtaagggctgctttttatgttctgcagtattcatagttttagtacattactatagcctgtagttaatattcagtaaatgtcaagtcaataagtttgtgttcaaccaggtctaaacaaaatagttaatgtaagatatggtaaaaaagaggaacttaccttgaatggtgtatttgtgtttgtttcaagttctgacacagaccttagagatgagagagaactttcagaagcagttacaggagataatgtctgcaacatcaatagtgaaaccccaagggcagaggacttccctttcaagaagtggttgtaacagcgcatcttcaacccctgacagcactcgctctgctcgcagtggacgaagtagagtcctagaggcactgaggtgtgtacctgtcactgatggcagaaagactagatgacttgagagaaaggatttacgtacctgctgctgactcaattccatgagcttggcctaatttagcttttttttctttttttccccaatatgcagtaaaagctgaaatttaaatatcaagactagtgaaggggttatatgcctaggccttatttagcccaaacagtaaatattatattccagtattatctattgcttttggctctctgctgactagatttttcgttctagcttgtccttccatttcttgctcccagcagttctagatttcttactcggaggtggagcagacatggagatttgtcttacagcagcacctgcttcacagtgaggcatgattgatactttttattacctccgttgagaaagaaatgattttaagatctaatttgcctcatttgaaatggattcagtaggcagttctctctgctctttagtattagtattcaatagtatttgtattaaacaataagtacatatatattttttcagagtctttttctaatgcaatatgtaaaatcttaaagttatttttgttgggattttgcatgcattttgtattctccttgtaaaatttatcttctagaaaaggtgattacagtttctagtgtgatgtgacttaagctcagttgcataacttcatctttttcgtgatagaagaaaaaaatctataattgtgtgataagaattatgggacttgtattttcagttgactaattgaattaagtataagataaactagcatttatcttacgctaactgtattacatgaggcagttcattatctcagtactgagtaaagtagctttttaatatgcttcagatcatgttttatcattatagagaacctaaatcctgtaccaaatcagagtaaataaatatagtgtgagaataaaaggctatattctttatttttgaagcaaaggaactatttgggggttcctttggtaaattgttttatgggttttggtgttttgttttgttttttgttttttgttttttttttttttgcttctccacagtgtaagttttatggtaaattatttttactaagaatgaatgaatgagtgaatataaagaaaattataggacttctatttactgtcacgtggaatcattacaatcgcaccataaaatgcacttccctgtaattcagcatattgctgttccaccgtagactctggaaagtggttaccaatagccaaaaggcccttctgataaggcagcctttacagcaagcctcccatgtaatcatagtgcttataatttcaagtaattaaaaaatataactactgttaagtaaagtaaccatagtgtttgaaacattaccctgtttccctaacctgtataattaaggaaaatcacatttttaaatgtaccaattactttagtatttttaaaaaatttcttgacactgttgaatttctcctttgaagttttagttctgtagacatgtagtcaaaatatgtgttcctagctaaaacagataacttttctggaagaaaccttaaacctttttaaaaaaaaaaaatgtccctaggttcatttatttaatatttttaatgcatactgtgtgctagatggtgggcatataaaggtgagccacaacttttatggtctaacttatggatttaatgagtttggatttgttattgctgtttatttaaactgtcacttctattccttaggcagtctcgtcagacagtacctgatgtcaacacagagccttcccaaaatgaacagatcatttgggatgaccctacagcaagggaggagagagcaaggcttgccagcaatttgcagtggcctagttgtcccacacaatactctgagcttcaggttgacattcaaaacttggaggattctccttttcaaaagcctttacatgattcagaaattgctaaacagggtaacaagaaagaaatctttgcatttgtttgtattaagtacatgttgacctcttaaaaataaacagatgagcatgttgtagttctctgatctgaatgtgcaaacaaaaaaaacttcgtagatatttctggttttggtttaaacttgagccagaaaaataatttgtaaattgaggtacttcatcagtaaattgaaaaacattttcataaatttggaaatttagaattgggcgtttttttctagacatggtgtctaccattgttcttttattctagctaaccctttttgtgtttgtggagttaatgcttggtttttcttcctatcatcttattttcatttaagtcttttgaattctgcctagcacatacctacatttgttctttggattgtatgagtttctttctgaattctcctattttttttcttccttgagctttaccttaaaaacaaaattttcctatctctcatcttttttcttccttttcttctttttcacattgcatgatgacctcccattagatatatagatttatctctgcttctgcttttctccaagtgtagaattgctctcatgttacaaatttgggttacacttaacaatgaaaacttggtatttaaggaaaatgttgggagaagcccacagataacacacttgctctgtttaatgctaataaattgcattttttctttattgttattattgtcacatgcagatgggatgcatttatttataagttctggggataggatacttttttgcctgtactttttacattccagagtttgtgcttgacttcatcttgactaagacagatgagaatatttcctagaatttgtttttagtcttatttggatcctgtcacactgcagcattttattgtcctcagctgtctgtgatcctggaaacatacgtgtgactgaagctcccaaacacccaatctctgaagaactggaaactcccataaaagacagccacctgatccctacgcctcaagcccccagtattgcctttccactcgccaacccccctgtggctccgcaccctagagaaaaggtttgttgatccttaatatggtgatacagcttttgcatactgctgttaggctgtattagaaatttgttgatgtcaatatcaaggcttcatcaaatgttgaaaactattttttgcattgtatcattatttgtatatttcataacttagaagactgagtaaaataccactataaaagaactgtgtatctgatcatttttaatgttaattttttctaaagtaaaactttcattccagattataacgatagaggagactcatgaagaattaaaaaaacagtacatatttcagttatcatctctgaatcctcaagaacgtattgactattgtcatctgattgagaaactaggtaccagtattttacttaaatccaaaatgtcccatataataaccatatttggaagtcaaatgtagtcaatattaatatcatttgtaaagtctagaagtagaggaaaagaacatgggtaacttgtctaaggctatacattgagtcagcattggaactttgattttaaaaagctctaaagtcagtagatcatgggatttaaaattcaaatggaatctagcagttgaggtttaagaatcttctgtgctgtttgactattcattcactaatgaagctttaaagacttactatataaataaaaccacattttaatgaacttgaaaggttaataatatctagagaggagctccctcttgtttttttgtttgtttgtttccagttagaaacagtgtggaggccaggcacggtggctcgtgcctgtaatctcagcactttgggaggctgaggtgggcggatcacctggggtcaggagtttaagactaggctggccaacatggtgaaaccctgtctctactaaaaatacaaaaaaatttgcgagacgtagaggcacatgcctgtgatcctagttactcaggaggctgaggcaagagaatcgcttgaacctgggaggcggaggttgcaatgagccaagatagcgccactgtactccaggctgggtgacaaagcaagactctgtctcaaaaaaaaaaaaaaagggaaaagaaagaattcagtgtggaagagagctccttcttatgtaacattattcttattccactggttgtcaggctctccacctgacatcattctagaagcagcatagtaaaagagcaatctggtatactagagcagcactgtccaatagaaacagaatgtgaaccacataggtcattttaaattctctagtagctgcattttaaaaactaaaaagaggctgggtgcattggctcacacctgtaatcccagactttggggggctgaggtaggaggattgcttgagcctaggaattcaagaccagcctggcaacatagtgagaccccatctcaaaaataaaaagtaaaatgaaacaagtgaaatgaactttaaacatatatttatcattcaatatgtgatcagataaaatatcagtgagtttttttttatataaagtaaaaatctagtgtttatttaacttacagcacatctcaatttggactaactgtgcttcaggtgtttgatagccacagatgtctagtggctactctgttgaacaaagctctatagagttaggaaaactatagtaagagaagttaatctggcagctcagcatggaaagagaaaacattaagaaatattggtggggtttttttgtttttgttttgagacagagtcttgctctgtctcccaggcttgagtgccatggcacaatctcagctcactgcaacctctgcctcctgggctcaagcaattcttctgcctcagcttcccaagtaactgggattacaggtgtgcgccaccacgcctggctaattttgtatttttgtatttttagtaaagacagggtttcaccatgttggccaggctggtctcgaactgctgacctcagatgatccacctaccttggcctcccaaagtgctgggattacaggcatgagccaccgcacctggccaaaataatggttcttaatagtggccctgaagtatcaggaaaagattaaatgttatttaatgctgtctttttaagaatgtggaaaactatgatatgctttaaaaaaaaaaaaaagatttatgtcaaatacagttgtatacttggaaaaactttctcttttttttgcgggtgaagctcacagctttatttttttttatttttttattattattattatactctaagttctaaggtacatgtgcacaacctacaggtttgttacatttgtatccatgtgccatgttggtgtgctgctcccattaacttgtcattttcattaggtatatctcctaatgctatccctcccccctccccccaccccaggacaggccccggtgtggaaaaactgtttcttcttagaaactttactcatacaaaacactttgtttcccagttccctgataacttaggtgaggttataagtcagaattgctaagctttacccagaactcatgaaaatgaaaggcttcaagtgtcagtctcctatagatttttccatctctgcaaactttggggaagagtgacagcaattagcagagaattgatctagaagagggcaggaagcagaggcagatgagtacagattatgttggaattcagagtcttgtaactctagaggttttccaatattagaatgcaaagagacattataatagatattatgcccaatccttcattttataaatgaagcaactgtggccaactgatatatatgtatataaatcagtctattatgttgtctgggtcgcagaataagtttgttatgtagaattggaaattgatgtttatatattaatatggaattttaccttcttgtctttttgtcactctgtgatcctgagtaaggtgctctaccagttttcatgtgcataaatgcagataataatagtaaccttccttcatatggttgtgagaattaaatgagttagtaatctggagcactttaagtagttcctggcataaaataaatgctcagaaggtgttgctgctattattattagagtcatcttaaatcatgagtttgaatgttttgttaaaatcttagaaagtccttgatatgaccgggtgtggtggctcacacctgtaatcccagaactttgagaggctgaggtgggcagatcatgaggtcaggagttcaagaccagcctggcaaacatggtgaaaccccgtctctactaaaaatacaaaaattagccaggtgtggtggcgggcacctgtaatcccagctactcagaaggctgaggcagagaattgcttgaacccgggaagcagaggttgcagtgagtcgagatcgcgccactgcactcctgcactccagcctgggtgacagagtgagactccgtctcaaaaaaaaaaaaaaaaaaagtccttgatataactaactctgcccaaccagtggtcaagttaacctctaagctataaatcaacagccatgctttacataagcttatgtttacttatgccttcttctttcctcaaagtcaggcttcatgcatttatatctgagaagaggttcaattattgctttttcccacctgctgcttcatctcttatttatctgtgtgtgttttcttcccaagcttctctgttggtctgccgacattatttccactcataaaaaatttcctcctgttttaaagtctgcagatgcccctatcttacttccatctccctggttacccatattcggtgcttgaaaactgcttttgtaattgagacttaagagacataaccaactacagcgtgtggctcatgtttatgttctatttctttttgtatcctaattataacaatccaagtgaagacaaacaggaaaaattgaacaaggatttagtactgagacagcaaagaatctttgttaatcctattagatctgataatggcattatggctgtttaagaaaatttccatatattctagagatgcatactgaaatacttaggggtcagtaacatggtatctagaatttgctttaaaatagttaagcaggaccaggcatggtggctcacgcctgtaatcccagcacttcgggaggctgaggcaggtggatcatttgaggtcaggagttcaagaccagcctggccaacatggtgaaaccctgtgtttactaaaaatacaaaaattagccaggccatagtggtgtgtgcctgtaatcccagctacttgcgaggctgagggaggagaatcgcttgagctggaggttgtggtgagccaagatcatgccactgcactccagtctgggtgacagagtgagaacctgtctcaaaaaaattaaaattaaaacagaataaaattaagtagttaagcaaaaaaaggtggcagaatttggataattttagaatataggtagctagtatatgtgtgggggttcattttactattttatttacttttgtatttaaaatgttcataataaacattttaatacatatatatatgtatataaagtaaaataattctaagtaagtcaagtttttttggtttaaatggtttggggcattttatttataaataatttctatgcgtagttgagattacatttttcctagaaagaagttgggaatcaataaagtacaatccatttttctctgcttaaggtggattggtgatagaaaagcagtgctttgatcccacctgtacacacattgttgtgggacatccacttcgaaacgagaagtatttagcctcagtggcagctgggaagtgggtgcttcatcgctcctaccttgaagcctgcaggactgctggacacttcgtgcaggtgtgtattcagatttgtggaagtttatttttctttaaaagcaagtgtccaccgggtgcagtggctcacacctgttatcctagcactttgggaggccgaggtgggtggatcacctgagatcaggagttcgagacatgcctggccaacatggtgaaaccctctctactaaaactacaaagattagccaggcatggtggtgagtgcctgtaatcccagttactcaggaggctgaggcaggagaatcacttgaacccagaaggcagaggttgcagtgagccgagatcatgccattgtactccagcctgggccacaagagtgagaccctatctaaaaaaaaaaaaaaagtaagtgttggctggcagtggctggctcatgccactttcagcactttgggaggccaaggcaggaggatggcttgaacctaggagttcaagaccagcctgggaaacatagcaagactccatctctagaaaaaataaaaacagttagctgggcatggtggttcccatctgtagtcccagctacctaggaggctgaagtgggaggattgcttgagcccaggaggtcaaatcaagaccctgtctctaaaggaagaaacagacaaatttatttatttacttaaaaaagtaaatctcagatttcatcacatttgctgactgctcataaaattgaaataaccaaatatggccagttagagtataccagctttttcaataacaaagccaaacaacgaaacttcgcagagccaggttcacctttaatcactttttaaatgatttaatttgaatgttagtgttgtttttaattgaaataacattttcttagaaagtttcaagattatctcattgtaagctttcatctttactacatagacagataatcaagttatcagtacatacctcctctgagactgtgtcctttcatgaagttagtcttacagcaggtgaaatttgtccatctgaatattaccagttgccaagatatagctatcattttgtttcttaaaaatgtatgtggtatttttctgatttctaattaaaagccaaatatacttgactcttatatgaaactaatctacatttcctccatgctcataaaacaatatttacttagtactgtctgtatttgtaacaattaaatgtatagctttaacagttattagactttgggctccttgaggagccctgtatgttgcacagtggctccccagactgtaacaactcaggtttgttggacaaattctctaggaagaagactatgaatggggaagtagttccatacttgatgttctgactggaatcaatgtacagcaacgaagactagcacttgcagcaatgagatggagaaaaaaaatccagcaaagacaagaatctggcattgttgaggtattaaaacacaattatataggtaatacaaatagcattcaatattgtgactctttcacattttttttaaaagagaatgtgcttcaggaaataatgattctacttgtcttttttccccaaatttttgatggctcttttaaaaataatttatatatgtaaaatgtggcccatattgcatttcttccaaagaatcttttcagcatctaatgtcaggggttcttgacctgagtccacagaccttctcaaaggaatttgtagatcaaatctgggaaggccatgtactttgcatggggagaaaaatacatccttatttttactaacctctaattgaaaattagcacttccggtcttttttttttttttttttaaattttaatcagcctacatcatgctttgagaaaactagcacttcctttaatgaaaggtctaggcaacaaatcacaacactatcaactgtacctgtaattttgcactaacagaaatcacatgtttctgttttgcattgtaattgcaagcatcttgaaatactgtttgtgttcatcagtactttagttatttatattatttgttaactgttgatttatcaagagaaactattaggccacatgttcatgtttcatagttcaggaacacaagtcaaagacaaacttctgtgtattaatgattcagtccaaagaaattctttatattccaaaatcactttgcactctgaaacataatagcactcttcatctcagattctttcatggaatcataacttctgtagaaatcagcatgtcctttctgttttggttcagccacagcaaacagagagctgcaaccccagggatataaggaatgctcccacaatatgaaatcacagacacttggccagaagaccacatatctgaggttttgtcaaagcactgaaagccatattagttattgtctgctactttaatataaagcacatctataattacacaacaaatttgtttttaatattttgataactttcaataaaatggcttccttttgtaatcctttatattttaattttaacattttctaaaaatcacccataaggtttgggaattatatctcaatacagctattatttagagtagtctaatgaccagactgccaaagggatccatggcttacaaaaaggttaattgtattagttcgttctcacgctgctatgaagcaacacctgagactgggtcatttataaaggaaagaggtttaattgactcacagttccacatggctacagaggcctcaggaagcttacagtcatgtaagaagcaaacacgtccttcttcacatggtggcaggagagagaagtgcagagcaaagtggggaaaaaccccttataaaaccatcagatctcctgagaactcactatcaggagaacagcatgagggaactgcccccaccatctgatcacctcccacgaggtccctcccccaacacttggagattatcattcggattacaattcaagatgagattttgggtggggacacagccaaaccattatcagaacccctgagttaaatagtctttcatgttgtattctaagttctctgatatctccaaatccttattagccatgataccctctcttttagagtaattccactggcttttgttagttgttattcccttcctaaatattttgtttccagtttgtaaacatttttaagagaagtgaaacgcaggcttcatctaacctaaggagctctgcttgaagctcttcccttgattaatcaaaagaaaaaaatactagaaaagactaaacatcaatcacactgctttgttttaatgttacctaatcattaatggtttttcattcctcacgtatttcttgatggcctactatgtgccagataccatggattcacgtttcagtgttctggccagagataattatactgtggcaaaagtaaagtttataagatttattgacaaaactaagtctacagataaaatcatgcattatctgtattattttgttattttccaaatgatttcaccactgattgttttttatttgtagggagcatttagtgggtggaaggttattttacatgtggatcagtctcgagaagcaggcttcaaacgccttcttcagtcaggaggagcaaaggtttgtatcaaattaatttactgacctttttacatgaataatcatctaaccaagattgctatgatgagttcttcattttctctactttttgaaatggtaatccttaagtacacattatacagctgaactactttggaatactggtagattgtgatactaccttgttttttcattaggtgctacctggtcattctgtacctttatttaaagaggccacacatcttttttctgacttgaataaactgaaaccagatgactcaggagttaatatagcagaagctgctgcccagaacgtgtactgcttgagaacagaatacattgctgattatctcatgcaggtttgtgagattctatccttgacctcctcattaccagagatacgtttatgtgcatagataagtaactgcacaacaaaaccttcagctcatgattagtagaagattagtctcctgttattctcttctattccagccctttcagttttattctatttgtgttttttattataatgaacatattatgtaaacatttagcttggaagttaaatatgagaagagtataaaaatctaggtacctctaaaggctttaaaaataccctttaaaatgttggaatataaagcagaaatcgattccaggagtccaaggagaaacatttatccaaaggtcctttagttttcttgactgtttgctttcatgtacattaaatacctatgttagacactgtggtaaatttaagcatttgctatatggtgggcttactactctcatattcagaattggcctgtgttgtgtaatttgaatggggtaagaaaaatcttctgacaccagagtgcccaaaaggccatcaggagtcagcaggcatgacacataatcataaggattagatttcataatcataatctatgaaggatttcaactgggatgatacagaaataaggggaggccaacactcaaagtcagctttgtgattttgctgctgtgcttggagattgctcaggatttaatagaatgcctaaaacacaaatgtgaagccgttatagagcagagggcatactgattagtatccacgattttatctaaggttttcactcaacgtgatgtttttgacattcattcaagttgtagtgtataccagtagttcattcctttttattgctgagtagtatttctttgtctgaatataccatagttgattcattttcctattgatggacccttggactcctggaatcagaaatgttccaataagcacttcccttgagcatcacataagtgctcgaaagtttaggattttgtaccatttctaacttttggatttgagatgctcaatctgtacattattggtgggaagtgtaaaatggtaaaaatccctttgacaaaaggcctggcagcttcttaaaaaacgaaatatttacttattctattacacagcaattctgtcctatttacccaggaaaaatgaaaaaatatgtccataaaaaagcctgtatatttttagtagctgtttgtcatcttggttatcattagtaaagctactaaaaatatacagggatttttaccattttacactttccaccaataatatacagattgagcatcccaaatccaaaagttagaaatggtacaaaatcgtaaacatttctgatttctgggtttcggttgctcaaccagtaaatataaatattccaaaatctgaaatacttctgattctaagcacttcagataagggatactcaatctgtgtaagccttctggttattccatattttgccaacatttagtgttggcagtcatttgatttttagccatgcggtaggtttatagtgggagcacattgtaatttgtacagagtgtttgtaatttgtatttccctgatgactaatgacatcgagcactttttctttcatggtctctttgtttgtttgtttgtttgttggtgtgtgtgtgtgtatttaatatttttttctaaaaagttattgttttagcttttatgtttagctctatgacctattacaaattaatttttcttaatgctctgaggtatggactagggctggtttttttccatatagatatctaggtgttctagcaccatttgttgaacagattttcctttcccacaaaagctttggcatcttgataaaaaatcaaatgatcgtatttttgtgagtctctattctgtttcattatctacttgttgatacctttcctactgtgtcttgattactgtagctgtacagcaacttttgaagctagtattaagactacaattttagttgtctttttcaaggttatttagctgttccatgtcctttgcatttccatatggactttagactcagcttgttagtttctacaaaaaaaaaaaaaaaaaaaaggcctagagtggttaagattaggattgcactgactctatagaccaacttgaggacagtaaacatctttacagtgttgagcattctattccataaacctagaatgtctctatttaggtcttctttaatttctctcagcaacattttgtggtttttcagtaagggaacttacctatcttttgttaaatttattcctattttgtgatgctattgtaaataaaaatttctagatttacatttagatttttttctacaatttgctgccaatccaaaagaatataaattttgtatattattatttatttattttgaggcaaggtctcactctgttgcccaggctggagtgcagtggcgtgatcttggcttactgcaacctctgcctcccaggcccaggagatccacctcagcctcccaagtagctaggactacagccatgtgccaccatgcccagctaattttttttttggcaaggggaaggggtagagatagggtttcaccaggttgcccaggctggtctcaagcaatccacctgcctcggcctcccaaagtactgggattacaggtgtgagccactgtgccttgcctgtcagtcttttataccctatgatcttaataaaattcacttagtacaattagtaccttaggctttcctacataagcaatcattttatctgcaaagagatttgtagattttcccttctttatgccttttatttcttgttgtcttatgtggctaggacctcaagtatgctgctgaatagaagtggtgagattgggcctccttgtctttattccctagcctaggtggaaagtgttcaatatttcaccagctatagggtcttcatagatttttttttccagattgaggaagagtccttttattcctagtttactaagatttctttttcatcattaattggggttaacttttataaaatgtctttttctacttctgttggagttgttataaggtttttctctttccttctattactatggggaattacattttcaaatgttaagtttcatgtatcagtcccacttgatcacgccatattaatctttgtatatattgctagatttagttgagtaaaaatttttaaaattgttttcagggtgggatattggtatgtaattctcattgttttgtaatgtttttgtcatcttttggtattagcgttttgctggcatcacaaacaagttgggaagttctcccttgattttctcgaagagtttgtgtaagatgcctctttcttccttgaatgtttgaaggtctggagttttcttttttttttttttgagacacggtctggctctgttgcccacactggagtgcaatggcttgatctcagctcactgcaatctccacttcctgtgctcaaatgatccttccacctcagcctcctgggtagctgggactacaagcgcacgccaccagtcttagctaatttttgtatttttggtagagacggggtttcaccatgctgggcttaagtgatccccacggcttcccaaagtcctaggattataggcatgagccacctggactggagttttctttttttgtatttttattttttagatggagtcttgctctgtcgcccagcctggagtgcagtggggcaatatcagctcactgcaacctccacctcctaggttcaagtgattctcctgcctcagtctcccaagtagctgggattacaggcatgagccaacacacctggctaatttttgtatttttagtagaaacggggttttaaccatgttgtccaggctgacctgaggctgacctcaggtgatccgcccaccttggcctcccaaagtgctgagattacaggcgtgagccactgcacccggcctggagttttctttatatgtggttttttgtaacgaattttctttactagatacagcgcttttcctattttctgtttcattttatgtcagtttttaataactggtgtttttcaaataatatatccatttcatcttatcaaatttgttggcataaagttcttcataatattcttattatccttttagtgtaataagtttattcctggctgggcacggtagcacacgcctgtaatctcaacagtttaggaggctgaggtgggcagatcacttgaggtcaggggttcgagaccagcctggccaacatagcgaaaccctgtctctactaaaaatacaaaaaaattagcggggtgtggtggcgtgtgcctgtagtcccagccactcgggaggctgaggcaggagaatcgcttgaacctgggaggcagaggttgcagtgagacgagatcacgccactgcactccagcttgggcaacagagcaagactccgtttcaaaataaataaataaataaataaataaataagtttattcctgatattgtcaacttgtgttcatttataactggcttatttaggagtctgttgtttagttcctaaatataagaggatttttttttctatctttttaatttgtgattgcccattgaattccattgtaatcacagaaaatactctataattttaattcttttaaagttattgagacttgttttatcacccagcttcatctatcttaatgaacatatcatatatgtgaaagattttatattctgcagctgttgggtgttgtgttctaaaaatatcaaataggttaatatggttgataatgttgatcagattttctgtgtatgtgggtttttttgtttgtttagttatatcaattactgatactaaaatctccagctgtttgtggaattgtctgttttttctctttaattttgtcagcttttaccccatttatttcaaactttgttgctagttgtttacccatatataatttctttgattttcacatattgatcctttgttataacacgtatctctgggcttactccgccttgaatgtacattatctgaggttaatatagccttttcctgtttactctgtgtcatgatatctctttgcatggtttttaattttaaacttgtctgtgtcatatatttaaaatggctttcttgtagataggatatagttgggccttgctttttttttctttggagtgtttagtccatcatgtaattattgatatgattggatttagggatggggttttttgctgtttgttttctatttgttctttgtccttgttcttctttgtctttcttggctttttttgtattagtttaatatttttagaattttattttatccattggccttctaaagcaaaaatatatttaccttttggagggagaagtgtttatatgtagattacaaattacttcctgaggccgggcatggtggctcacgcctgtaatcccagcactttgggaggccaaggtgggcagatcacctgaggtcaggatttcgagaccagcctggccaatatggtgaaaccgtgtctctactaaaaatacaaaaattagctgggtgtcgtggcgcacacctgtaatcccagctgcttgggaggctgaggcaggagaatcacttgaacctgtgaggcggaggctgcagtgagccaagatcgtgcctctgcactccagcctaggtgacaagagcgaaactctgtctcaaaaaaaaaaaaaaaaaaaatgaaaaaaggtagatctcttgcatccaagttggttcatttgcttcccctgtcctttataccaggggtcagtaaactatagccacctggccaaacctggcccactgcctattttataaataaaggtttgttggaaaacagccatactcattcatttatgtattttctatggctgcttttgcactataatggcagagttaagtagtttcagcacaaatcatctatcccacaaaatctaaaatgtttctgtctgagcctttacagaaagtgtgctgacctctgctttatgcagtagttgtcatatattttacatctacatcttatagccccaaataagattttactttaaataggttttgcttttaacaattctgtgcattttgaggaaactaaaataaaaaatggtattttataattaccctcatgtataccagtttgagtgtcagttttccctgaagatctgagtttccatctgataacattttccttcagcctgaagaactaactttagtttggagtgcaggttgattggggatcaattctagctttctgttgtatgaaatgtctattctaccttcattgttgaaggacagttttgcaggatacagaattatagattgacaggtttttttcttctattaaagacttcactgtctgctggcctccattgtttctgttgagaaatcagtgatggtcatttgaattgttcccttgtattcaatgtgtcatttttgagaccagccaccagcctgggcaacacagcaagacccttatctccccctaaaaaagaaactctaggttctattgttcctttgctcctccaaagagtactgtgttgtttaacaggcagtttacttcatacactgtgtttgcgtccccagccccccatttgcttggttcgtttattctccaggctctatggttgcttttaatatattttggtcagaatttgtagctgttatccatggaagaattgaatcaaaaggcacttacttggtattttgtggtgattcattttcaggttgcccagtctgccatattgctagaaaattaagttttattacacttataataaggaggaaaagatccatttctatgttgggaaatggttgtggggggaaaatgcaagggttttggagtcagatcagttatgaaatttggctttgctacctgctagttatgtgacattggttgttttcatttaaccttttttattttatctcaaaaatggggattaaaaacaccgatatgaaatgtttgtaagatctgagctagtcccactctacctgaaccatacacgtatttctttgataaaaggtgagactttgtcccacagggtccattttgtttaatttgctggaacctaggaatgaatatgcgttttcctttaagtttgtcagattcatccctgagaggtctgagatttaaagaaaaaatctattaccagatcacgtaaatgtttgaaatcattttaaaaaatcacttatttttccttttataggaatcacctcctcatgtagaaaattactgtctaccagaagctatttcatttattcagaataataaggaacttgggactggattatcacaaaagaggaaagctcctacagaaaaaaataaaatcaaacgacctagagtacactaatcgcatctaccctttagttaccaaacattaaatgtttttaaaaattgaaagcctgaatgtgactgtgatagatttgggtagtaatttaaagatgagtacctgaagaattctgcttcagagtataatgatgacccttcttgagttttgaacacctgaaattgtaatcactgaaatattaactgtttcttaataaaaagttacctgaaataacaacaaaatacaactcctcagctagcttgctgttaaaccacattgaagtctgttaaaagatatttatttttcttgtaaatatctgaagctgtagcttagtggaaattttagcaaggtaatggattttgctttaaaatgtctgccttacaaattcataacaacaagatttgtcagtcagcatttattcatgttttccctgatttttatcttctcaccattttacctcttttaacaggagcctgagcacaaggtttaatgaggaagctggggctataaatatgtgtgtatatatgtatatgtatgtttgtacaaatctccatgatgtttgccaagtttgaatgcgcaaaacttggaaaatgtgacaataaagaataaaagtagtaactcaaattagtattaagatgtgtttacatagataaattttttaaaagagcaccctggcatctgttcttctgttgaagcaacaaaacatttatgtaacgtaaaaaatgaattgcaggggcctgggtgcggtggctcgtgcctgtaatcccagcactttgggaggctgaggcaggcggatcgtctgaggtcgggagtttgagaccagcctgaccaacatggagaaacctcatctgtactaaaaatacaaaaaattagcccagtgtggtggcacatgcctgtaatcccagctactcaggaggctgaggcaggagaatcgcttgaacccgggaggcggaggttgcggtgagctgagatcgcgccattgcactccagcctgggcaacaagagcgaaactccatctcaaaaaaaaaaaaaaaaagaattgcaggccaggcacggtggctcatgcttgtaatcccaccactttgggaggccaaggtgggtggactgcttgaacccagaagttcaagaccagcctggacaacatggcgaaaccccatctctgcaaaaaatagcaaaaaattagccgggcatgctgtttgatgcttgtagtcccagctacttgggaggctgaggcatgagaattacttgaactcaggaggcagaggttgcagtgagctgaaatcatgccactgcaactccagcctgggtgacagaatgagaccctgtctcaaaaaaaataaatgaattgcttaacatttctgatatttgttatttagaatattgccctattagattaaaacatactgttattggaactctgtattgcattagcctttattatgctaaacctaaacacctaatactacatgcgttaccagaattctctataaatacacctaatttcattttaaggacaaactagaatccgttaggaatgtaattttgatgtaaaccgttcaattccaaatgactttttgaaaggcagattcaaacagtgaaggagagagtgctcaacttggacacaaaatcccttaaattttcatcagattttcttcaaaatggagttgagggtatccctgctgctagaggattggtcctacagggttttcagctttgagctagttcacagcttaggacaatacaaattctacacagagaaataggtagcattatgatgtaaactgtccccctcccaccaaacaaaaaccacatgggcctgtctttatcagagctattttattttagctgaatcattttgtagattgtagtacgtttccctgaattttattactcagaatcctttgaaataggccaggcacagtggctcacacttgtaatcccagcactttgggaggccaaggtgggcagattactttaggtcaggagttcgagaccagcctggccaacatgacgaaactccatctctactaaaaataccaaaattagccaggtgtgccggcacgtgcctgtaatcccagctacatgggaggctgaggcaggagaatcacttgaaccaggaggtggaggttgcagtgagccgagatcgcaccactgcactctagcctgggtgacagagtgagactccatctcaaaaaaaaaaaaaaaaaaaattctttgaaatagttactttttaaattacctaatataccactttcttttctgccaaaattatgaatggttttccagttcaaacttagacacacagtttaccatttaaggctccaggtctcagtttctcctcctaactttccagcatctgcccatactctgtataagccacttgaactctggctttggctgttaatctgtaaatgtcctaatgccagcaacaatatcctcttatatacaaataattccaagcataggtagtcttcttgtttaaaaaggggagggggcagaacttgccttgattagattagtatgagtttcttttctgaatggctacgatattttaatctgtgatatttaaattatcaccttatatccctccacgaattttcctgtgcattagtctgatctcaccaacattcgttaattcaacaggtaggaatcctcaacctgtgcctaggattcagcaacaaaccacctggaacacatggtcccttagcacttgaagaggtaggaatccttactgtaaatacagtactcaattatactcagatttagtatttacactgttaaggactgagcttgtccccctaaaattcacaggttaaagcctaacctgctatgtgactgtagacagagcctttataaggggattaaatgaggtcataagaatgagtccctaacccaccaggactagtgtcctggtaagaagagggaggcacaccaggagtttgccggcacggaggaaaagccctgtgaggacacggggagggcagctatctgtttacacaccaggaagaaatgtctcaccagataccaaccctggccgtctcctggattttggatttccaatctccagaactgtgagaaaataaatttctgtttaagccactcagcttgtgatgttcctttgtggcagcctgagcagaccagtaacaatattaacagtaataaggttcttactttggggcctgagatgcctgggaatggaacaggctgttttgtatatgagcatttttagggtagagttcataattctagagtttggatctgtgactttccacccaaaagtcacaaaccactgctctaatgcaaacctattatttcacatttacacctctcacctagaagtgctttaatacaggctgctttgtatcagggcttggtttccttctgacctttcaagacataaaaatcattactagcttgaggccatgcaaaaataagcagtgggccatagttgactgttccttattttctatccctaaaaagattttaaaatctagatctgtcaacaagcaaggcacccagctcaattttttttttcttttgagacggagcctcgctcttgttgcccaggctggagtacagtggcatgatctcagctcactgcaacctctgcctcctgggttcaagccatgctcctgcctcagcctcctgagtagctgggattacagacgtgtgccaccacgcccagctaacttttctatt

SEQ ID NO: 15 - DNA, 140619 bp, Homo sapiens
gctccctggatccgcgccgggaggaaatgatgtgttgctgcctggttaatcacagctccagacactcattggccgagcgctccgcagccacttcctcctcctcctcctcccgctcctcccgctccggctcctgctctttgcagccgccgccgccgccgcagcctccccctcggcgcagggggaacttttctactctctgtgacggtctcccccgccgcccccgggggcaagcccagctggtccgcccgccccgcccgcggtcgtgctcccagcccgagcctctgcgcctcgggaagtttattctgcccgccctcctccccttcctcctcctcttcaccccgcctccccgccctcccccggctctttcccccgggtggctgccgctgccgccgctgccgctgccagcctgctcctcggccagccgcgccggccccagggccgggaagctcccggccccacgcaccgctccgctgcagccaccgcagccgccgccgctctgggccggccctcggcccccggctcccggccccgcagagttccgggctccctcgccggctgcaccgccccgccccgccccgcgccgccccgcgccgcgccgacctgcagcgcccggctgcctcgcactccgcctcccccggctcagcccccggccgcggcgggacccgaggtgagcgcaggtcgccggccgcgcctgctggagccgggaggactgagggaggaggtagcctagcgggagaagaggcagggatcgggggtggcagggtgggcgtctgcggtgcctccccctcgctttcattcctttctcccccaagcttgatcccctctccgtgggggaagcagccgcggaacaaaactgtcttgctttgggcctgaactgctggtgggatatggggggtgggggggcagaggcgtggagcgggggtctcaggtttgtattggggtgtgtgtgagtgcgtgtgtgtgtgtgtgtgtgttgtgaactccttcagggtgtgcgactctgacttgtaaatcgatctggccgcggggccacggggcttaccttcctagctgagcttgtagagagtaaggagatagataggcgaatttcccccaccctcaaaatatccatctcttccaagaggaattttctgctggagagacagccaataaactctgctcaactccctccctccctcggttcttcctagctgcagtttcaaaaagcttcaaagccaggaatgtgggattcatcttccgatccccagaaggcaaatgtggttacagatgttgcacggtactttgccaagtttaaaacccttccttcaacactgtaaccaaaacagtgaggctagaacctcgggcgcactaagaagagatgtgggcctctggggccgctggattcagtaacttccgtcgggttctagactggctcggctctgtccagtttgtgccagatagtctcccaccccctccccacccctcctttcccctggagatttgaacgctgcttgcatgggagaaaagctacttagagaagaaaacgttccacttagtaacagaagaaaagtcttggttaaaaagttgtcatgaatttggcttttggagagaggcagcaaggtaatacaatggacttgtcaattttattgggcttttctttcttttttgagggatgtatgataagagttagatgatgggcaaaggggcccgttccatacatgtttttacatatttttgagaagaggcccatgaattgagacataacccagtggttttaaagaatcctgtcccagagatgcagattgctctgacagcccaagggaaggcggtggcaaaaaatagacaccacctcccttttccccaaaaaaattcttcctggaaaggtggtgttaagaaatttcagagatgggctgatccaagtggcgggccttaaatggaaacactatagtatgtcctggcacttgtctctggaggtgggttgctggccaggggcccaggcttgggcagccagcagacactagacttgtgctgacctcagacatcggcctcgccatgcagcttcatagtgtgcagactgcttaagtttgaaatatgggcctcatccatttcactgatggggacataggggtcaggaggttatcttatgcctggatgggacctcgatcacttattttatgattcacttgtttttattttctgtcttggaattttaaaaaatggaattcttttgaagctgaaatctaggccttaagttgatgtaactgggtgttggataatagcatttctgctattaccccttatgcaggtactcacaggtggtgaatgatggatagataaattctggataggtgacaaagactaaggattgggatgattatagattgggttcatgccctccttttccagctgtgttgttgagttttacttgaaatggagagggtggttttaaataaaacttgatttagatagtagtcttacaacttttgtaccttggaagagagtgatcatttgaattctagcaagtttgttgttatctgtgaggaatttaaaggaatattaaggattcagagtaaagatgccatattcaggaatgtaatgtattaatttcagaagtgaggaacttaatttgattaatagatttgtaacgaatttttttcaaagtagtgatttgccagttttcttcatgtgtccaaggaaggtataacagagattgagtcaggagatagaggttatgcctctatcttgccctagattggactgaactagtcccatgattgtcatgataggcttctaggtaattctcaggcttggattgagtagtccagtcttctgagggaggggggacaggacagaaatggatttgaaaaatgattctgctcttcaaggtcatgaggtgaagatggaatcaatgctggggctgggagctgtagtctgtggcttgttctgctcttggatctctgcatcttgatttatttttatgtgaagcgatctcatgcccaactcagtaggaattctggagaagcaaaccactgatggtggcaaaactctttgatatgtttgggtggctttaatgacaggatagtttaggggtgctggatatgtgctaggcactgggctcagctcttcacaggtactttttcatgacatttccacaaacaccatatgtcttattattattttaccgtcctacaataagaaattgaggcttggcaaatttcagtggtagaatggggatttgaaccagaggtctgcaggacttcagaactcatgttcttggccacttttgccagtgattgtcaaagttcattcactcacatactgtcttcctgagtttaccatggctgagtcccacttactctattaatatttttctttaaagcaatgattcacttaaagaaaagaacctaaagacatcatttttttgagaggaaattatgtattactaccatatttggaaagccaactcacttgttaggaataggaggtagtcataaatatgcgtttgtacttgcaccgaaaccccaacttcagaataatgattatgtggagtgtgtgtatgttgcagggacctggaataaaaatggaggaagtaggtagatgatacagtgttggtgatgttctggtttttggattgggtgatgggttcataggtgctgattttatttttagactttataacctacatacacaatacattttttctaaaatgataaagaaaattaaacacataaccattaacataatgattacttagggaatattttactgcactatgctgactatagatttagcttggtgccttgtttgcagtgggcacacagtaactactggctgatcgataagaccccaggaaataattgtaaagcaagctcattgtttgttatatttgaataaggttgaggtatgtccccctcctcccctattttctcctgcttctactctcctttccaatattgcaactaaatagtgtgggctgcagtgaggtttcacctggctgtagttatgggagacacaggctgggctgaagctagcacttttcagcatcaccttgtcttatatatctagcacttgggatggggcaaagaatactgtcatgaagtgttaagacaccttcctttttacccagtagtaaggtgtgaccattcagagctggaagcagtatttaagttaaagcagggcctggatgaaatgttaacaacattaaactggtgaggctgggaaataaagccatcagaaattttaattggaatccgcagaatctcctgttttattttcccaagcaagcaccgggcactgtggctttattcctggaaatgaggatttggaattgggtttcctggtacaaaataccttctttgatcttttggagtgaaaactttgtgtttctttctgtggccaattccagctctcagaagaaccaaatggaagatttacctcctcatttttagcagttggccatagaatgctcttgcttgccatgttaagtttaagaatcagaagttctaaactagggtttgtctgttggaaggacattcaaatgaaagactccttttgaaagagcctcatcagtttggtgtggttggcacatcacagcctttggttcagatgggaggtagttttgcttgaactcacactctcaaaattaactaataagatattcggcagcttccttttctgagttaacacaaatacaccctctgcccctaatattcaaactaaccacacattcgaatactattcctgtgcgcttctaggcagttctggaaatgtgagattgtttatatgtataaaggctcttatgtgatccatcagagctttgttttccagagccacggctattcagttgtttgatttttgggtttcactctctgaccaacattccactttgcccattagagttacttcattgttgactctgggtatttggcctttatttctgtgactgggaaagtaactttaaatttcagtcttcctaaattttgtggaggtttgtgcagtaggtgaaagttgttttgaagagggggatggggtgagaccacttttagcataagtgtcctgagggatcacccaaggtcagttctcattcatcttgaggccaaaccctggctgttctggtctctgcattgcccctcactcccctcctttttgggggacccagattcttcaaggctcagagtaatcttactgcaagcaagaatgctttctggattttgccattttgcctttcgacagtctcctaggttttatcatccccatttcttattctgggatgtgattgatctctttgagggcaaggacttcaagttgttcattcctccattgattctttctacacaagtcattgctcttcaccaacttaaaacctttcaaattctctccctgggctccttgaggcaagggactgtcttattcatcttttgtgtaacttttgcacctaacacaatgcctggcctagaccacacagtcaataaattgtttttgaattgccgagagaatgaatggatgattgcatattaagggagcaaagggacctagtcttctagggaaccagggagattgctgacaagatgataccagtcactgtggtccgtaaggatgagtttggaaagtggggacgaaagacattctatgtagaaggaactgcttttgatacctcttctcagtgcttaatgttgtaacctgtgcttagtcaattccacaaacatttattgtgttcttttcagcatatgtttctttctttctttttatatttaagagtgatgcttccatttttgagaagaatatctcactaattttttatatcccacagagcagggaatccttcattatttatagttaggacccagacactcagtgaatcaattactttactcttgactttttcctgttgcatatgtttccaaacagttgacagtgaaaacgtagtggtgggccatgcttatgtgagaggtggaaaaatgtaggtgacctctttggaaaatgggtggaatccaaagtaaactcctcttttgagagatttttaagggctgaaatcagtggacataccacatataacttttcatcttgaatacttgatgggtgtgtgcttttgctcatctatgaaagccaagattggctattaatatcaccatgccatcgaaaagcaagattactttgatttgggggattccgttttagccagttctggaagaatattgataggccctccaaaatataaccttgaactttagaaatgtacagaggggagaacgaaggtggggtgatcttgggcaaagttggatattagaaatgggacgatacttgagagtttggaacgtgggtactgaggaaaatgtgcaataagaagaacttgagaaaaagcattctggaatagaagggatgggttgagtgatgttttaaaccaagttccgaaacttccactattgcagctattgatgagtgttggctacgcttggggtgaaagtaagatgtgcttgatttactctctgtaagtagtgagttaatgcatataagcaaacatgaccataaaggcaggagcttagggatgaatatcccttgtcttgatgtcagggacttacacaagatagaaatatgcataggagtgaaagtgtaggtggttatctagagtgacaccttccttttcaggagtaagggacacatgtgcccagtgctatttttcatacagttttcatatgcttatcttgaacttgaagaacccaagttgttgtgaacaataggtggcaagaacaaatatattatgaggatggcctagtaaaaaacagaaaagctcagtcagcagagattactttatataaacataaatgttctatttcagtatttttaaaacattttaacactcagcagtacattttatatcatgacctggtacacacacaaacacatatgcatgtgcacaggtgttaaaaataaagctgaattacaagttctacaaaaatattataatgctttttaattaatattcaatttttattttaaaaattctagtctttatatactaaactgattttacaacttgctaatgggtcctaataagcagttagagaaaaaactgttctaggtattgtggaaattagccttagtttgtttattgaatagttgctagtctggatgagactttcgttttctttttgtgtggatttctgtcattctatagaaagttcttacccctatgcccctctcccttgccagattattttttctgtgtattgtttccaaatcagattaaagtgagtaatacgtgatttggaccagctccagtgtgcatcatcatcatcatcttgatccccatcagcatcaaaggtggggctgattcatttagaatggtggcaggagccacttaactccctgtttatttagattatacttgaagaggttgttgactttcaggaataaggggaagctgaggttacacacacccaaaggatgagagggaggtggggaagatgacccccatatattgttcagaaataaaaaatgaaagcatgtggttagtagggacagctctttgcattcaaagacacaagagcttaattgttgtcattgtccttatcattaaaatcttgctttcctcttccttcatcttttcccgtcttctttgtcccttatttattgagcatttatcaagtcttcctctaggtaaggttgggcatagaaagctcagttattgtcaagttaatattaaggtgcacttgagtaagggagtgaataattatacatgtaactattagtggcagaactctgaatatcttggtcacaagttacagaggatcaaccaacacctttaaggaggtggctgtttggctggcctctgaaagaggtaccaattggatgttattttgagaggtatctgtatgtgtataggttgtagcataggcaacattccaaaaagagagaatggggcaagtaaatataaggggcttgttttttatttagaggccaagttatagaaaagatagttgcagattttttttttttttttgagatggagtctcgcactgtcacctgggctggagtgccgtggcgcgatctcggctcactgcaacttccaccttgggttgaagcgattctcctgcctcagcctcccgagtagctgggattacaggcactcaccaccatgcccagctatttttttttttcatttttagtagagatggggtttcaccatgttggccaggctggtcttgaagtcctgacctcgtgattcacccacctcggcctcccagagtgctgggattacaggcgctagccaccgtgcctggcagttgcacatatttttaatcactagtctcagactatgtgtcctgggatgcagcttctcagggtggcatgcgagaccttagacaaccgaaaggaacagcacattcacagttaaaagtgctttgtgatgtgacttgactctgtagagcacatcaagatgagcaccataggagcaagcttagaaagggagatttagaggcacattatggcttactttgaatgacaggctggaagttaaggcatgaaagcaggccttggtctggcccctttcattatctcatttaatgctcactcacactccatgaagtacctgctctaatgcccattttatagaaggagaaactgaggcatagagaggtgatatgaatgtctaaggttacacatctgaactttaactcaggctgtaaattcccacatcaccatcagtgcaccagagcagaggttgaaaactggtggtctctgagctcagtatacctcagagttctgtcctgtttgatactgtatttaaaacattaaaaaaaaaaaaacatggttgctaacatgtaaaaatgggggacattttcataaaaaaaaaatcgaaatgtccagctgctcctgcaacactgaaaactctggcagccccagggccatattccttcctgcaagaaactgccagatcttttgaccatgtctgtctgagggagatgtgtgtgctgtggctgctactgtctcagttcatcctgttttctcccagacactgaggctcggtgttagttgctgtttattgttcttgcactgacaggtttgtttgtttgttcctgtaggctaactggattgaccctataggtgtatgagtttgaggccttggcacatagccttctgttagccaaggatgattggtctagtggagtgggatgcccagaagccaggaggaaatgagaatagatggaactagggttttagccttgggctggagaagccatagggcttggtgaataaattacttttgcaatgagagggagggtaggggttgggcaaacatatgtgacttttggaacctggatgactgggagaatggtgttgctcttaaaagaaaatggaaggttgccaagagcacctgggttggaatggattgtggcgttgggtttgaggttctgggagagcaagaacccagaagaatgcttacttgagccctgtgagaagctgggaaaatggaactgaaactctggagatagggtttggggctttggctttgtattggctattggatttgtactggtgattggtgagaggatgagaatgtcctgggggagagcttccttttggaaatgggaagaagtgggttgaggtctgaatgataaaatgaaccagctacaaacagttcaaagtctgttattgactttttggggtcaagtgccatatcttgcaaataaatcaaatgtttatccgaatagaggagtaaaataacagtctccaacttttgaacatgggaaactgataaaacatctgctcatagaatcaaaggcagacatgctgtttgatgggtgacacctgtatcttatgtctgtgcctatttcactgagccttattaaggtaaaactgattctaatagtgaccttttcttggtatcatagatgatataaaatgtgaaaaagaagttgccggagctccaagatggggaaaaaaatgccagaggaaaatgctctctgcttgagatttatccttgcttttaaccagtttagaatggaatgtccttttcaaattcagagaagctttcccccccgcctcccttggcttgtttgcttaggattccctccaacttattgtttcttaatcagctgtgtccacctcagctcctctctcttctcctacttggttcccttttgatccctaaaagtcttattgttttaggacattctaagcccaagtgcggtgaatctgtctcagatgtgagtgttgtacatggaaatcttccaggagggcatttcttttgttctcatagaggcttgtctccttctggggccatacaactctgacatttttggtttaattcaaattggtgtttttgtttttcgttcctagatagctttatttcattacatgtgcacagtaatatgagttcctatacattttttcctagaaataaaataactttattattttgttttatgtttttgatactagtcatattatgacaggaatatgtgtgcacaatacaagatttgaagtacaggaagggtgtacagtgaaaccgttttaattcagggactgtccatagatagagttcagtactacctgaggtttcgggcattcactgggggtcttgaaatatatccccacgcctgcagaaatcaatcagtcaatctatctatctatctatctatctatctatctatctatctatcttttttctttttcttttttttttttttgagatggagtttccctctttttgcccgggctggagtgcagtggcgcgatatcggctcactgcaacaacctctgcctcccgggttcaagtgattctcctgcctcagcctcccgagtagctgggattacaagcatgcgccaccacgcccggctaattttttatttttaagtagagacagggtttctccatgttggccaggctggtctccaactcccgacctcaggtgatctgcccgcctcggcctcccaaagtgctgggattacaggcgtgaaccaccgcgccctgcctatctgtctgtctatctatctatcaatcatctatctcctgtgtatctggagataaataccaaggattggaattgctgaatcaagggatatttgcattttaaatttcagtataggttgtgccgtgaattggatttttgctttttatttgtgaagcaatgtggtgtggtgataacgagaggatgacccttaagactcaaatgctagcctgttgtctggtgtaaaccaattgtgtggcctaagaaagtcattttcttaacctttgtctttgtggtgctttcctttcctcatttgttaagaagggcacaggcttagttatttctaaagtttagtaatttgttgattctctcagtctcactcttttttggtccttccagtaaatggagctttatgatttttttttttttttttttcctgtgtaagtttgagtctataaagaactctgggctttggaagccttgctaagcacagctttactttgattgttttaaagcactatgtctggtgtgtgctttacattaaaagcagagcttatatggctgatcacctttttaaaaaaaaaaaaatatggtgagtggtaagtaggcatttagtgaccaggaaactcatatagtcagctttttattattgatcaagagtggaggcaatggatttttagacttaaggaaaaagttttatttttataatagctgtaaaaaaagcagtagggctatgatagacagtttttaagaaacagcaaaattttatttatgacttcggaacagaccataagaggtagcttttgatcttttgaactgatcttttgaatttgatcttttgagcttttgatattttgtaatgtgaaggtaaaataggaatttttggaaattttgagatatttagccagtattgcttaaaaagatgattggatttcctgctgattgtcaaactagatctatttaaaaactgaaacccaagtaaacaaaatttaatgggaatttggccaagtgtggtgtccaagtgtgattatagtggatcacacctgtaatcacagcactttgggaggccaaggcaagaggattccttgagtgcaggagtttgaggttaacctgggcaacatagtaaaactgtgtctctacaaaaatttttttaaaaattagtaaggtgtggtggcatgtggctgtagacccagctactcaggaggctgaggtgggaggattacttgaacagggaggtcatggctgcagtgagccatgattatgccactgtaccccatacaggctgggtgacagactcctgtctcaaaaaaaaaaataatataaatttctttatttcccatactgcattttttctttagaatttgctcctgcaaggcagggcacggtggctcacgcctgtaatcccagcactttgggaggctgaggcaggcagatcacgaggtcaggagatcgagaccatcctgactaacatggtgtgaaaccccgtctctatttaaaaaaatacaaaaatttagtcgggcatggtggcatgcatctagtcccagctactcgggaggctgaggcaggagaatctcttgaactcaggaggcggaggttgcagtgagccgagatggcactccaacctgggtgacagagcgagactccatctcaaaaaaaaaaaaaaaaaagaatttgctcctgcaacattaagcaatgtatttggattccaagttaaaagacttggaatttgggttgttaatataaatgcatttcttctggaaaatttttgagcccttagttactcattttaggaaaatcacttactaaatctttctctctctctttttattttttttcttgagatggagtcttgctctgttgccaggctggaagtgcagtggcgtgatctcggcttactgcaacctctgcctcctgggttcaagcgattctcatgcctcagcctcctaagtaggtgggattacaggcatgcaccactgcacccagctaatttttgtatttttagtagagatggggttttgccctgttggccaggctggtctcgaactcctgaccacaggtgatccgctggcctcggcctcccaaagtgctgggattacaggcgtgagccactgagccctgcctgaatctctgtaagtatacaaatgtattcaactaggtgtagagtagcaaaaaaaaaaaaaaaaaaaaaaaaaaaaaaagagaaacaatttaactgttctataggctgggcatggtggctcacgcctgtaatcccaaccctttgggaggcagaggaggccagatcacctgaggtcaggaattcgagaccaacctggccatcatggtgaaacctcatcactactaaaaatataaaaattagccaagtatggtggtgcacacctgtaatcccagctacttgggaggctgaggcaggagtacctgggagatggaggttgcagtgagccgagatcgcaccaccgcattccagcctgggtgacagagtgagactgtctcaaaaaaaaaaaaaaaaaaaaaaaaaaaaaagtaaatgttctacagcagcggttaggtttatatatattcatagaatggaattttatgtaatcactaaaaatactatttttgatgaattttcagagacagatctcattttaaaagtagttaccttttctttttttttttttttgagacggagtctcgctctgtcgcccaggctggagtgcagtggcgggatctcggctcactgcaagctccgcctcccgggttcacgccattctcctgcctcagcctcccaagtagctgggactacaggcgcccgccactacgcccggctaattttttgtatttttagtagagacggggtttcaccgttttagctgggatggtctcgatctcctgacctcgtgatccgcccgcctcggcctcccaaagtgctgggattacaggcgtgagccaccgcgcccggccagtagttaccttttcaaagaggcttttgttggctattccatctagtttgagccttaattattttccgtatcttacagatactaccttatatatatattagtaaatacaaggtatgtctgttttgtactctgtgtgtgtgtgtgtgtgtgtgtgtgtgtgtgtgtgtatgtgtatatgtttatcctgtgcctagtatgctgtcttatgcataggaggcacacagaaattgttgcaatgaatgaatgactatagagagtacacaaaatattacatgaaaaaagcaggacactcaaaacatagtataattcctttcatataaattatgtacagttctgtagtacagttccataaacataaacatgaaacatagtacactttcatatttgtagttaacgtatatatatggatgtagagaaaaaaaagattggtaggaaataatcctaaagtttagcagttatctctgtgctgtgggtcatgcataattttgaagagacaatctttaaatacaaatggataaagtaaatattcaaaattatgtcagctagataatgtattttaccctttccacattaaaggtggtcaccttacctaaaatgatgtattataatgccgtggccttttatcctcttgagtaaaatgtactgtacctctctagtgtgacaggttttatatctactttaggattaaattatgatctaagagttgcatttttaagtaactagctttaatttcacatcagttgaagttaaagggtggtgaaagtatattagatctgctacaagtgtgtaattataattattgacacattttcaaatgctctcttaagtatgatgcattgcccgtgattttgacagctgtgactacattaaacctgctggaatactcttttcacaaagatttgtttaaacttagaattgtcagaaggattctccataaagtggatgaacacagatttagaggtgaaatggtggttcatttcctactgtgcctgttgatttttagtctgttaaatgttaaacagaagattacctggatttagttttcatgtcaagaaacctgggaattttattttatttttatatagtataaaaatgcgtggtgctattcctttgtgataggactgtatgcaatgatggcatagaatctcattctgtctcctgctgaaggtccccaaccacacaactccgaactgacagacttgatgttgcataacagccttattttctgaacgtctccttcaacaaagttcacatattatctccttttcatggccattctatccttctatatagatttattaagtagctactgtgtgccaggcactgaggatatagacagaaaggctgtcagagagctcagcttggcagaggcagaaaaagaaatagccaatgtacagtaaagtgaagtgccacattagagctctaaacataaaattgggatgtacagttctgtttgagggcactggaggtcatctcagggaactgatgttcttgagtgtcttcaaggttaagtaggatgttgtcaggtggggaaagggccttctaggcacagaggctttcagtagagacagcaacctttaaaactgaatatggctagaaccttgctactcagcgtgtggtccttgggtcagcagtgatggcatcaatagaaacacagagtctcaggcttacctcaaatcctgctggatcagaatcagctttgcagcagtatcccccagtgatctgaatgcttctaaaagtttgagaaacattggacttgagcgtaggaaggggtaaaggatgggagagcttggaaagtcgaccacctgcaaaggagattggatttttttttttctagcaaaaagttgataatgaagaagtgacattattagatttatattttctaaaaattgtctggaagtatatgtagagcagcatctgccaagaagctttcttgaaaccttaatagtgtataaggtgcttcaccaaaaaaggtcctcaaataagtttgaaaaatgcaggatattatattcttctcttggacaatgtaaagtatcatagtaaattgaaagttttgagaaattggctttgaagaaaaccattagcttaaccacttatcctggaatatccctagggtgttccacatttgttccacagtggaagtctttgtagcctcacagctgttaataccctaggggtggtgggtagcattctgctgaacacattttggagaatgccagcgctgcttcctaaaccttagacactttgccttacctgagtagggtgactgactgtccgggtttagcggagactgagggatatcctgggatgccagactttcactgccgaagtgggcaaattggggtggagttggtgggtacccttcctggcagtttaccacatatattactatttgctttattttctttaggtgggctcagccttctttccttcaattcctgtttcagtctcattttcatggactggtccccaaacttgtctgcattggaagcacctggggagtttctagacctgagcctgtgcccacctcatgaggttgtgatttaattggtctggggtatgtattggcccttggggtatggggtagacttttcaaaaggtcctcaggttattcaaacgtcatgaaagtttgttcaaagcaattatacctgtggaaatgtagtcttgagatgctacttaagaatttatttcttaagtataatctataatacaaaaaacgaccattaaaaagaaaaaaaagttgaagaatcacctagcagcatgtgaggcgaccaccagttgtacatgttccacactttgggaaacacttagggggataatcgaagtgtgggcacaaattagggggctggaacttatttggtgagtggtgtggctggaaaggatattgcagatttcagggctgtttgggagtctgagcccatgagatgtggtgattgatctgatctgtagggtggaatagagtaggaaaaggagaatctgataactgcaggcaatctgggggtagatgatgatcatgttactggaaaggggtcccaatccagaccccaagagaggattcttggactcgcgcaagaaaaaattggaggcgagtccatagagtaaagtgaagcaagtttattaagaaagtaaaggaagaatggctcctccataggcatagccccccaagggctgctggttgcccatttttgtggttatttccgaattattttttaaacaaggggtggattattgatgtctcccctttttagaccatataggataacttcctgacattgccgtggcatttgtaaactgtcatggcgctggtgggagcatagcagtgaggacgaccagaggtcactctcgtcaccatcttggttttggtgagttttggctggcttctttaccgcaacctgttttatcagtgaggtctttatgacccgcatcttgtgccgacctcctatttcatcctgtgacttagaatgcctaactgtctcggaatgcagcccagtaggtctcagccttattttactcagcccctattcaagatggagttgctctgattcaaatgcctctgacaatcacataacagaacaggaaggtgtggggaatgcagtaaggtgacaggctgtatttgagaggacttgggatgtccaagtagagctgtctggtgagttgtcggaagaaaaacagatggggcatgctggctcatgcttgtaattctagcacttagggaggccgaagcaggaggattgctttaggccaggagtaggaaatcagcctgggcaacatagtaagaccctgtctctattaaaaaaattaaaaataggccaggtgcagtggctcaggcctgtaatcccagcactttgggaggctgaggctggcggatcacctggggtcaggagttcaagaccagcctggccaacatggtgaaaccccgtctcgacaaaaatagaaaaattagcagggcgtaatggttatgtaatccataaccagtagtaatcccagctagttgggaggccgaggcaggagaatctcttgaaccctcaagatggaggttgcagtgagccaaggttgcgccactgcactccagcttgggtgacagagcaagactgtgtctcaaaaaataaaaataaaaagaagaaaaacaattaatatatttaatagcttagagaggaaagggctagatacagatgagagcctctgcttcctggtacaggaggcggtaaagttcaagtggggatcagaatttcctgagagaaaggggagagggtggatctgtcaccttggtccaagggatgagttcttggagaaggaccttgagagaagagtctgggaacagcctgagaggtaggaggaacactgaagagaggctcctatcgccatagagaggaagggaaggctcctcccaggtagccctgagaacccagtaagagaagagctcaagagggcattttgttggtaagttagtcatcattagtagtgttcgtaagtttagcataaaggaggaaaccaacttttagtgggttgagagggaggagaccactagatcgagtgacttttttttttttaagtttttactgacgaaaaagcctggcatagtgtgggaccttagggaataaatatgggtttgtttggggagtagtcatcttctggttactcatggaagttatgtcaacaaggaagaaaaaattacaaggagcattcacacattcacagaaaaagtgccagagttacctggggctccataaaatccctttattttgaaatcataactactcaccttttctctccatcttccctaaagtttgctctgttattctctagacacaacaatctcaatttctgaattgatattcttataaatgtcattaggatttcttacggtgctgacaaggctgcttgtgattaagtattcagcctttgtctatatgtggtacacatttctggagggctttgtagtttaccaaagcaacactgcattttacatgatcctcttaataaccttgtacggaggcagggcagaaaatgatattattttattttacagggagaaaaaagcctttgaggtttaaatatattaaggaggacctgctgatgatgaatgatttagtgatggatccagggtgcaattctggtctctctggtacagtatttcttccttatggtggaggaagacgggggaagggtatcttcttctttttttttttttccaattagtttataatttccttgaggacggggaccatgtgttcattgttgagaccgtgggtgtcggagatgggtaggagagccctttggtccaagctttaccacacacaaggacttcacattgtcttgacattacctttgtatcacagagtcccagaaatatccagaattgtgtattttctttttctttctttttttctttgagtcagggtcttaccctgtcacccaggctggattgcagtggcacaatcatggctcactgcagcctcaacctcctgggctcaggtgatcctcccacttcagcctcctgaatagctgagactacagtgcgtaccaccacacctggctaatttttgtattttttatagaagcgggatttcaccatgttgcccagggtggtcttgaactcctgggctcaagcaatccacctgcctcagcctcccaaaatgctgggattacaggcgtaaaccactgtacctggcccaggattgtatattttcaacaggattgaaagaaggtagcatggatcatgtaaccttgaacttgcgtctcagtatcggaccatgtaattatcttgagaccagcccaatagtattgcttggcatgttttgtaaatatttaaaacatacacaatttttgtcatcctatttttacatttaaaaaatattttttgataccagaaatcatctatagtggaagcggcccaaacctctctggacttcaaagggacccttctctgtatgtgcatggaaggacctgaaaatgaactagcccctgtaacaaagctcaagtccagtaaagatgatgttttgtaaccaccacggggcacaccacaggcactcaataaatacttgttagtttgaattgagggaggtgttgttttgtgttaaacattctccacatttatcacaatgggccactgacaagttttaattttttgtaatgatctttcccatgagtcattatagatatggcactaggatttggggaaggagaatgatgaaagagaatacagaactgggatcagcaagttttaggacaagagatgagaagttttgagtgagtgaatagttgaaagcaggcaggagttgctcaggggaaactggaaataggtggaggcacttttaagacagcagaccgcacggatatgaggatgagattggagtaatgcagagctgatgatatcttagtgggggaactgaaggcttttttcaactttaattatagccacaggaaaaaagcacattatagcactttttttctacctctactaagggctgggaggatataatctgtctcgtagagtcttgtcaaagaatctgtacttcagactacactgaaatgtatttttttttttaagtttttggggtgtcgtaggttgaggaagaggaataagcatttgattccttgtgtttacattaaaatttcaagctactatttcatgatgatgcgaggaactttttagtcattgaagagatttaggcggatgagttaatgtttggtcatcagaaaatgtagcatgaggagcatgttcctcttgggaggaaaaaaaagtatgagtcagacaaaacatcaagtcatttcccaccactcgatgcagccacccttttgctgaaggaccattgaccctgcaagtataattcagacagtaatgaccactggcatttgaggcagactttacagtttataaagctcttcccccagactttacagtttataaagctcttccccctcaagaccactcacggtgttgctgactctttgtataacattggcacttctgatgaggggggcacaagtgagttattcttctagggaaggtgctttgatttaaaacctaaaaatgccatctgtaattcaaatgggacagagttttcctttgtgaggactcatcagttgttcattgacattggcatggactgttgcccagtctggagtacagtggcgcgatcttggctcacaacctccactttttgggctaaagtgatcctcccatgtcagcctcctgaatagctgggaccacagatgaaagccaccacgtccggctaatttttgtgtgtgtgtgtgtgtgtgtgtatatatatatatatacacacacacacacacacacacacacacacacacacacactttttttttttttttttaagagacgaggtttcaccatgttgcccaggctggtcccaaactcctaagctcaaagcagtctgccctccttggcctcccaaagagctgagattacaggcgtcagccactgtgcctggccagttcgttggcatttttgaaaaatgctaaaagtcagtgtactagcctgtaacattgggagagtgtaaggtttgtcttatatacttattttatttttgagatggtgtcttgctctgttgccaggctggagtgcagtggcacgatcttggctcactgcaacctctgcctcccgggttcaagcgattcttctgcctcagcctcctgagtagctgggactacaggcatgcaccaccatgcccagctaatttttgtatttttagtggagttggggttttaccatgttgaccagaattgtctcttatctcctgaccttgtgatccacacacctcagcctcccaaagtgctgagattacaggtgtgagccatcggtcgcacccggcctgaaaaagattcactctttttttttttttttgagacggagtctcactctgtcccccaggctggagtgcagtggcacaatctcggctcactgcaagctctgcctcccgggttcatgccattctcctgcctcagcctcccaaagagctgggtctacaagtgcccgccaccatgcctggctaatttttttgtatttttagtagagatggggtttcaccgtgttagccaggatgatcttgatctcctgacctcgtgatcctcccgcctcggcctcccaaagggctgggattacaggcgtgagccactgcacccggccgatacactcttttttcattttggatttgccagtgtgatggcagaacactgtcattgtcttcctctatctctgttcttgatctttcagtgatgtttttatgttgtgttccattttgctgggtatcaaataatcaccaagtctttgtgcaaatcaagagagataactagctagaaatatgtgtgtggaagataggtatgaaatgttaggaagaaaaaaatgcttcttttttttttttttttttactcctttagggtctgattgattcatgcttttttatttgttgaaattttttgaatactaactatgtgctaggctctgtgttgattatgtgttggtgacactgagaccaaaggtgctattcctggcttcaagagaattcatggcttagtaaaaggaacacgtaaatcagtgattacagtacagcttggcaaatgcgggtgtgcacaatgtacagcagtgacccagagggggaaacttaacctgcgttagggagaaggatgtagggaagcttctgaccctggaagatattaagtgaggacttgaagaataagtagaagttagcctggtaatgtagaggaagggcattttagcatagggaaacttcattgtaaagatagaaggcataagaagagcatagtaccagctgggaatgcaggtagtttagttgaactgtagcttagggtgcctgtgggaattgatgtgacataaggctggagaggtgggtaatggctatgtcatgaagactacttattgcttcctaaacaattcaggtcttatcctgaaatatgctagctattggattttagggaggaaaaggatcagattagatttggattttggaacggttatgagcagcagctttaagaaggttctttttcaatggtgtctattcatctgagctttagactgaattttgtccttcccaattgatgtgctgaaaccctgaccctcagtgtgatgctatttggagatgaggtctttgggaggtaattagctttaggtgaggtcatgaaggcgggaccttcctgatgggattagtcagcttgtaagaagagatatcagagaacttgctatctctttccacatgaggacacagcaagaaggctgcccctgttagccaggaagaggaccctcactagaacctgacactaggcatcctgatcttggacttctagcctctagaactgtgggaaagtaaatttctgtttaagccacccaatctatgatgttttattatggcagcctgagtagactaatacaatctatttattttttgggtaattgtgaaactaggaacaggaaggatattatagtaattcaagtaagtagcaataatttggctactctattttgatttaaaaatatttgggcatggaacaagtcgttatttaactgaacttctagttttgagatcttattgttaggatattactagctacaataagttttatgagagaattttctcccttgaacatctccacatcctaccttttattaaagtaatccactgatgccctttactatagaggctttgggtcttttcattgttttccggtcagcaggttggtacagctgaactctcagtacctagtgcctgagtgttaaatctgttcgacagccctctgctttatctaattttgatactatgacatttatattgttttaaaggaatcttctgtggatggttttaggagttctgtgggaattaataccatttagaggatcatataactatggcagatgatgtttgtgataaaattggtacctatcttgtgtatgtttgaataactatttaaaataatatttttcatagttttgtttttatgtctgaagatctgtcttcaacattttatgcagcacttaacttgtgcctgatatttgagtctagtttccctttctttttccaaggtcttgctcttttttttttcttttttttttttttgagacaggctctcgctctgtcatccaggctgtatagtacagtggcatgacctctgttcactgcagtctccacctccctagttcaagcagttctcccacatcagcctccctatagctgggaccacagccatgcaccaccatgcccagctaatttttgtattttttatagagatggggttttgccatgttgcccaggctggtctggaatttctgagctcaagcgatccacccgcctcggcctcccaaagtgctgggattacaggtgtgagccactgcacctggcctattctttatttttttcaactctgttctttctccccaattctctctaatttgtcctctttattggccttttctcttgagtttggaaataggcttaagtattctgtcctttaaagtgttttgatgcctatacctctcataagccccttcctgaggaagcattttaaaaaatgaatccacattcaatgctcttgcctcttcagcctgtagtcttcttcagaacataataatcttacattgctcccatgtattacatgtttcggaagtgcctaccaaatgccaggactgggcgggtggggtgggggtggtgtgtgtgtgtgtgtgtgtgtgtgtgtgtgtgtgtgtgtgtgtgtgtgtgtgtttctctgtctccctctcaggagtcctctttttagtggtagggtcacaagattgggaagagttatttagcccatctctccattacctgcagttgctctgcattttaccctctgagtgaatcctcagccttcactgaaattctacaaagttaggggatgcgatatctactaggagcccactctgcctttggagtaatctgactgacagagggttttttggcctataataaatgtagcttctatttatcctttgatcacagttcttttcagctatacagaatatagagtataatagtatttttatgtgattagagctgtcatattcacccctaatatcttttttctaagaatgtctccatagcttccactggtcgtcaccatcctgcctgccttgttgctcatacttctgtttgattgagtctttaaaaattggtttctagagctgattgcaatattcctgactgggttttctctcctgattttttgacttccatgcttgtattatgcagctcaaactgctatatttcaggtggccacttggttttacttgaagagttgatcacccacagaaatctcagtttttttccatagatggtactgctaggtcctgtcttcctcaacctctccttgtctgcttatacccttgtcttttattctctttactgcatatgggatcttaaatttaccttaagttaactttccgtttgctaggtcctgcccatagcagtttgcattggattccatttctatcattttagggaagatatgggttttttgaaatagcaccctttgaatgtagtaacttaacagatctgtctaatctgttaagatagatctgttaagttaagatggatctgttaagttaacagatctgctaagctaacttttctttgttttttttggagacacagtcttactctgttgcccagactggagtgcagtggcgcgatctcgactcattacaacctccgcctcccaggttcaagcaattctcctgtttcagcctcctgcgtagctgggattacagatgtgcaccaccacacccagctaacttttgtatttttagtagagacggggtttcaccgtgttggccaggctggtctcaaacccttgacctcaagtgatccgcctgccttggcctcccaaagtgctgagattacaggtgtgaggcactgcccctgtccaagtaaacttctttttctttttatcttttgactttttatttatcttgatcacaaatatttcataagagatgttgtcaagtctagatgtatatgttcccttgaactgccagcttaggaatcttaacgagaaaaggaaactgggttaatcttgtatgatttgttcttactattagggtttgcagggattactactttctaagtgtttaaaatacattctcaagtcttgcctgggacttggtctgagtctatgtagtctgttggcatttttccctctttttttttttttgagactgagtcttttctgtcgcccaggctggagtacattggcacgatctcagctcactgcaacctctgcctaccgggttcaaatgattctcctgcctcagcctcccgagtagtttggactacaggtgtgcaccaccacacctagctaagttttgtatttttaatagagacagggttttgccatgttgaccaggctagtctcaaactccagacttcaagtgatctgcccacctcagcctcctaaagtgctgggattacaggcatgagccaccgcacccggccttctcattttaatttttctgaagcatctagtgattacttgttcctttctgacttcattctttgctgacctcttttctccaagttttggaattttctgaggttgcttttcttctctttttcaatcgcatcttttaagattctctatgcttgcattgtccagtaaggtagctactagccacagtcaacatagaaatgttactggtttaaagaatctgctgatttcaagttgaaagccagaacaggaaacactgacacctgggtaggaggttaaggttgactattccaggaatggagagaggagcaggaaagtggccacaatttaactagttacacttgcttgttggctgttgccaggttatccgtgtatgttcctggcccctgtctcctgctaacaatgagtcattattgcaaataaagtaaatattaataaatctatgtgtagaatatttttaataaaagcctatgtgtagtgtgccaaaagataatgaggtttggaagcaaagtaagttcttaaattgacagtttcgatgcgtgattctgtgtagtactgctaaacttgctagcttattcaaatactatacaataatgtttgtaggcatttcctagtgtttggatattttctgtaagctacagttttgatatatactactatacttcacattttttattaaacagtttaaaaagtttataatagtgaatgaacactattggaagtatttaaaaaataatttataatttcagaaattccaattttttccctgcaaattttgaagattgatattgatagagagtttgaaacaatagtacatagtgcttgtccaacgaactgtttgtttcttttgataatgtgataggtacagaaattaagatagtgtttagagactgttatggtaatttgacattgccatcagtacctgtgatcagtggattcaacccattgaacaaggagttttacaaaagtattggtccattacagatagtaatttagttgtataagtactggtctaggtgagaggtagtgatttcttggaccagacttgaaagtatgagaagagattggttggaatcaggatatactttgaagacagagccaatgggatttgctactagattagatgacagattattctagattatctttccctctaaactgcttcatttgtaaaatgtgtgtagttatgacagcaacactcatttttgttgtagcttcgtcagctgtttctttgagcttgctggaaatccctcatgttcattgctgctaataatcatctttctaatccaatcatgtaattcccttgactttcaaccatcaactgctcaccattatatagatacaagaaatattaaactgcttaggttgacttttaagatatgaggtgcgacttctttcagactcttttccatgtcctcttttgctcctgacaatagcccaactagactgcctgctggtccagtcaatctctttctgcataataaattatcccaaacttgatggcataaaacgacaaccattttattgtgctcacagtttagtgagtcagggatttggaacatgcacagcaaggacagcttgtctctgttccacaatgtctggggcctcagctgggaattcttgaaggttgggggctggaatcatccaaaggctcattcactcgcatgtctggcggttgatgctggctgttggctgggagctcagctggggctgtcagctgaaacacctacatgtggtctctctgcatgggctattttgagcttcctcatagcatggcggctgggttccaagagcaagtgtctcaaaagacaggaagtggaagcttccagtttcttaagatctggttctggaagctgttacagtgtcacttccaccatattctgttggtcaagctgtcacagagccccgttaaagagaaggagatatagatcccacctcttgatgagaagagagccaaagaatttgggggccatttttaaacaatcaaagctatacttcattcagatttccttagttttccccagtgtcctttttcagttacaggatctcacccaggttacattacattgagttgttatgtcccctagggttcctcttggctgtgatagtttctcaaactctccttgttgttgaacaccatgacagttttaagaatgcagctctggtattttatagaatggggtggtggggggatatttttaaatggccacatcctactattcaccagacttctctgtctttctgagtctctctgtcagctgctctctgtctccactcctcgccccctccccagttcaaactccatctctttctccatgcagtctttgtcatgtctcatcctctggctaaaatcagtttttctctcttctgtgttcccatagtattactgtttgtaattcttgtgtggttatttttcagtgtttttctttcttggtagattataaactctttgaaggtaagaaccatgtcttgcttacctttgcatatctcatagcaggtaggttttttgaacggaacattcaatatcaaactgagtctcacatctgacacccagatgggttgggacttaacagtggttaaatagaaaatataatgagaaaatttaaaacattccttaaaaacatcgtttctgatgttgtattttaaggcttttaaaatggactctctgttgtagagtaaaacttctaatttttttctcccttagccataaaattaaaagagagtagctttttttgatattatcaacatcttcctgctcaggtcaatctctgataggcatgtcctagtgtttttttgtgaactttagatctcagtccattactggatcagtttagggagtcacacccaagactagaaataaaaggaaattgaagttttgaataaagcttgtgaattgcaagggtaataattgtttcgttaaatttgtgtttcagttttatatgcatgtgtataataagttcaaatgtaaaataggtattaaaattttttgaaagatactctcctgtgcaacatcattctaaactgttgatgttctggttcatttctttggctttttctgttttagcttatttcttctggtttcctttctgagggcttatatacatacatatcgattctggggaccatgcacacatgttcctttaatctttacctatccagcctctttttataatagaggaatataactgctattctcagtttcctagaatagcacatgttatgttttctcttctcctttggagactttatacctactctcctgccctcgaggccaggaggtggaattagcttattcttttcttttttcttttatgtgtttattgaagtatagaatctatacagtgaagtgtacaaatctaaagtatacagctcaataattttttgcatttgtatttatccctataagtatcattgcagatgaagatgtagaaacaatttcatccatccagaggaggtcagtttattcttaaattgtttctggaacaaggtggtggtgtgagtaaattagtagattctctctgattccttcatatggcatatgtaggttataatgtttagttctgaaggtcgcaaaggtctgaagcatctgagttaggaagtgttaaaacagggagatgggatgttgaatgtgagctttggcagaattaaatgggatgagcttgagtgagccaaggggaaaagcaaagaggagtcatttcatgaagaattcaggagaagcaaggtttatttgaatttcagaagggaaaacattaaactcagtttgccactgctgctgtaacaaatcatgacaaatttagtatcttgaaacagcacaaatttactttcttccagttttggaggctcttgggagaatccacttcctttggcttgtggctcttcctccatcttcaaagcacattctttccatctctgtttccatcgtctcactgccttctcctctgtgaagttaaatctccttgtctctttcttaaaaggacatttgtgattatatttagggcctacccggataatccaggataatcgcctcatctcaaaactcttaatttaatcacatctgcaaagtccctttgtcacataagataacattcacaggttctggggattagggcatggatacttggttttgtttttcaaggatctttcttcataaagggaaggtctgctatatatttcctgctagtttattctcctttttaatgctagattaatttttctaaaacagcacattgtacattttatttctttgctgaaacatctttggtgactccccattggctaatacagttaatagggcctagactgacattcagatggctattgaaccccaagtcacatttcaagtttttctcctcctctttcatcatggatgcagcagcatgcattttctcattgttgcctccatgaccggcttgtctttgcttgctctgacttttcctcctgcctgtggggccctttcaggccttcccagcagcattcccctcaccatctgtattagcttcctagggctgccataagaaattaccacaaacaacagcaatgtaactgccaaagttgtggaggcctgaggtctgaaatcagggtgccagtagagttatgctctaactgatggctttaggggagactctttcctagctcctttcagcttctggtgtctccaggtgtttcctggtttgtggcagcatgactccaatgtgtaccttcatcttcacatgaccttctctctgtgcctctccatgcgtctctcataaagatgcttgtcattggagttaagtaccacctacagaatccaggatgatctcatctcaagattcttaagttatttacatttgcaaagacccttttcccaaataaggtcacactcacaggttccaaggttagaacgcagacaaattgattggcaggctactgttcaacccactacactacctcagtcagcagtcataacttatttctgtgacctcttgacatgactggcatgcctacacaacttattgggaccccatcatctctatcttactatttttggataattctcacctctttcactaaatcataagtccttgtcttagtccatttgtactgctgtaactaaatcccttagtctgggtaatttataaacaatagacacttattgcttacagttctggaggttcaaagataaaggtgtgggcaggatttggtgtctggtgagggctcactctgcttcaaagatggcaccttcttgctgtgttctcacatggtggaagggggggcccagggagctctttttttataagagcatgaatctccctaatgacttaatcacgcaccaaaggctccccccctcttaatactatctcattgggtattaggttccaatgtatgaattcttgtggggacaccaacattcagaccacagcagctcttgaggtcaaaagggtttcttttgctctgaaaccctcaattcctagcagggtcctagctctgtggtgcttcagaaacagcatctatcagatgatcaatttttttatttttaaataaaatgaaaagtgtcaagtaaaaatcctggtgtgattatcagaattttaacttgaaatatcacaggagatttttctcatcccaagttttttttgtttgtttgttaatttctggtactgtacttttggtgtggagtaactaaccacttttgattccctggaaccttaagtgagtaggcagcagagctgatggtggagtagccaagctgagaaaggcctctggagggaagagcaaacccagtggggacagggtgggtttggagatctgccagatacagcttggaagtcttgggggcagagctgtcactgttacttgggaatttgtcttacctgggctcttggcagtcttcatcttcactggaatcctttccagtgggttttacaaacctggaagacactcttgtgagcacttgaacttgatctcccacagcacagttggagggccatgccgagggcggcccccagccttgctttccataaggagatgatggtttcacaatgtcttctgcatgacagggcctcctttgcctgccctgtaagcacagctgctctttgaagcttaccagtgagcatgggtcttaggctgttttcccaattattctcttttctttatttggcttaatttcaagattatctgcgaatagctccttttttctttttcgtctttgaatggatgctggcagtctaaccccattaaagtttaagtactgctctcatgttttttgtattaagcatttgaaggtgactgattttcagcctttggtatgttcaggctcatattcaatggttatcttcatttagagttttactatatccatgaatcctaatataactgctcaggtctgtgcaacataaccattatttacagtgccagtattctattgcagggttggcctagaaggtacatgttaatcctttcccatgatatcatgggagaaaagaaaggctggaaaagaatccagagactgtgacataatgggtaagaatggcctatggtgtcaggcaagtgtgggtttgaatctcattctgtcacatcccagctttgtgacattaaggaagttacttttcctctctgagcttcagttttatcacctgtgtaatggagatgataattgctattatgtcattatgtgtgttgggaggattaagtgtggtaatatggatgcaaatctccgtcacagtggtgtctggtaccttggaagtgttcaaaaaactgtggctgctattattactcattttttagggaaaaccaaggcactagtgataattatggaatgtttccaagtcacccacagtaaaagtctaacttgtgggatttagaaaacagactattagtgtgttgagtaatgcagtattgaatatgtcagttactgcagtctggctctatggtatttatttggttagtttgcagaaagatagacaaatgacatgaataaaagcacacttactgactttcttactgatctgaagcatttatcatgctagctgtgtaaagctatacttcctctaagttcaaggcctctacctccaaattcaatgggaggatagaatttagagtatggtttaattattagtgttaaatttgtattcttaagaataattttgtgactgttaaagtctgagaggtttattctgtatcacatggcttttataatagagatgtgattaaatacactgttctttgtactaggaaacctggaatctgtacactgcctcgctggttttcagatcaaagaaaaaaaatcatagtagatgaaccttagaacagtcccctgcccagagttaatattttagattaaaattacattccttaaattcctctgtgtagcagattatttctgaaattttcagggggtgggggaagcaggaacataaaatgctagaaattgagtaaattgcatcatctttgaaccttaaatattgatgttgtaactggatgttgaagactttgccagagttcattgattcatgagttgaagagttccttatgcagggtcgtgtgttcatacttggaggaaatcttctaagatttggagtctgacagcgggagatacagggctggatgcatgaaagaacttccatgtggagttttctgcctgaatgtaaactctgagggcaggaacttgattgcatttgatgtcatacctccagtgcctaaatcagtgcctggctcattgtaggtgctcagtacctcctggccaaaggcatgaatgaatatgggaaggaaaggcagtgaacttgctgcagttcagaacgctttctgtactctgtactttatgcagtttatttctggcttggcctttgttaagggtcaggaagttggttggaagagagatccatccacatgttagaacatcagctgtgtgccagcactgtgccagtcctggagatgatatggtataaagaccttttccaaggtcttcttcagtattggactgttgggggttctactttttcttttgacagtgattgtaacaagggatgtttccctagaatgactccccctaaagtagcagagtgatccctgagttcaggggattggattaattgttaatttttttttttttttttttgagatggagtctctctgtgtcgcccaggctggagtgcagtggcacgatctgggctcactgcaagctctgcctcccgggttcatgccattctcctgcctcaccctcccaagtagctgaccctacaggcgcctgccacaacgcccagctaattttttaaaaatatttttcatacagatggggtttcactgtgttagccaggatgatctcgatctcctgacctcatgatctgcctgccttggcctcccaaagtgctgggattacaggtgttagccaccgtgccctgccaattttctttttttataaagagatggggtcttgccatgttgtccaggctggaatgcagtggctattcacaggcaagatcatggtacactatagcctccaaccttgaacttttgggctcaagcaatccttttgccttagccttcctaatagctggctctacaagtgtgtgctgctgcacccagctctgggtggatctttaactgtaagtttaagtaagtcctgacaattttgtttcattttattgtccctgagaagcagctaggtaaatgcggtcgttaaaatacatgtctaagcagtcttagtggccttcttggtcttcctttgctcctcccaagttagaagtcagggcaagtcttcccccctgcttcatcctatccccttataacttcagataaaataatgactataaggatttgaaatccctgtgattgtcgaaggagaagggttgagagtgagtgggtcttattttcctccctaccttcctatgtcaattttgagcctgtgtattctatagtttttttttctcagcatcaaactgaaatcttatttatatctttttcaactttaatatccccactttttgatctttggggattagaagccaagtatggacaagaggagagtggccagggcattgagtaagcatgtatgtacatttcataatttttgccatacctggtaggttgtgctgaatttcttgggcaaaaggcctgaagttctgttaccaccaggggaacaggaattgtggttgccgtcgggatcacagccaggaggctatttatagtctgtagtgagtggctgtgagcccaccatggttctgaatatgcctcctgccttaaagttcccagtgttcttgaagcggaccctgcccttgctggccagacagtagttaatgataaagtggacggctgcaggatgtggcgcgtgatcgccttggcggctcacagcctgcaggtgcttgtgctttggctgacctgaacccagccggagagcaggtgctccctgcccccatgctggcttcctggcctttttctcagctggcttcactgacatggagctgatggaccactcgctaaccagagtccactttctttattccacatgtgccatgtcaggttaagatttataacaggtcatgaatttagcttcctcatctctctgagttcaggtcaaatatctagatttgccttgcaaaaatggccaagatcaggtgacactttgcacttttagctcacattaaggtatatggactagaaggaaaaggtgaaaaagtaagttctcacaagaaataaccaagaaaggaaaacttttttcttgctttcatagcaatgtatgatatgcgtatttatgttgattcctggatgctctaatggtggagtgataatttatgcgttcgtttgcgtttgcaggtgatggaaaactccaacccaggcgagccttaataagatgaacatggaatggctgccattctgtggagtccagggtaaaacaggttttagatctgggttgactcagggctcaagcagtgtccctagagccctgttatttcccctccacttcttcttttgtcagttccatcctcagcaggttctcttttcaaggtagcaaaatggctatggcatatcctacattcaagtataatgagaaaatcacactttcttttctagtagttcctgtaaaatcccaagagtcactctgattgggtgggctcaggtcacgtcacaccctggaatccagtgcagtgtgatgattggttttcaaccacacctcagcatgcagaataggagggggtgtatcccagacccagttcaggagttgttgccgagaaggagagagggaggaactgaggaagcatagagtttctgcagaatgattccatgaagcacatattggggactttcattctcataaaaagagcactgttcttgggacctcatacagtgttgcttggttctcaaaaagtactaagttcttgtgtggtttctgggtaagtctggcatcccccagaagcagggagccagtgattttcctgatgcccttgggatgttcactgcatggtatcagattacagtaggtcataatggatgccatgcctggtagttgtgtggtgtgacattagatcaattagctttccctgtacgccattacatcaaagagtgtcgctggacagctattctcaacatatgttttgtttgtctctgaaaacacgtgttccatttctccctgggccattcagattcattttgggtgactgtcttgtcagcctggggctggggagaggggaggacaggcttcattttggcagtgcttcaagcttggagcagcatcctgcagccagcaccataagctgtataatttgtccatggaggcctatgcattatagaaatgaaaattccttatctgacagcattcattgcttagcatgcagcaatttggctgtcagaaacagctggccctgcagggtgggacaatagaaaggcgagacccgagagaggccagtgcttactcaagactcccactgtgagaggatcaggttactgagactgtcattaacaacagactgcaaggggctctgggcacagcttccagtgagcaggagcctgtggctcagacagtgagtgattttcccctgttttgctgaatggaacaaaaataaataaattaaaaataaaccattaacctttgctgacactcagatgttcagttctgattttgtcttctactgggtgatgagcatttctggggaagtaagtcccttctaacctaagtatagttattggtgcattgcagaaaactcaaaaaggagtggggctgaggggcaggatggattgcttgacacctgcatgttggagggctgtaatttttaggttctacttacctagaaacaatgctgaaaggaccaggattggagaccttatgaggcaggtttaaacatgaagtagaaatggggttgtgcgttctccccagatgtacatacttggaagagccatgcagcaagcagaggagaggaacagaggagctgtgtggcttgaccctcctcggaatctgcagtgtggctggctctgtgtgcttcctgtattgattccatgactcacggagcatgagctaagcagaaagcacacttaaactacagaggagacagctgtctgttacagaaggacatattttctgggtttaatggcgccacatttttcctaatagtttgtacactggggatgtacttactagtaatgtctgctaaagggtctttattgttttttcctttttgaataaaaaagacattctttaaaaaaatcacctaaatattattcttgacttttatttcacaacaggacttcccttctaggaaaacagtaccaataagcaacttgtcactatgggttgtttttttttcccccacctcttgatagcaagggtctatcggaagtttaaagcaatgcagcgggaagtaccttgcctttttgaagcgaatagcgtttcagagatattgggcggctcaaggttagttctcctgttggaattcgtttgttgttcagtgcgactggaactgtactttctcctgctctccctctaaatctgtttcgcttttacatgatagaggctgaagttcccagatgttgtttggattaaagagtgtgtgtggggagggggggaaaagctttcttgatgataataacagagtcagactggctggttctgtactgacaggaaaatggagagataaaaactccattaatggtgtgtgcattgcctaagtagccaataaaacaatgctgtcctcactggaagccggtcccagactggcaacgcttcgtgccaactgcaggagacaacagctgcaaagaggggcagagaattcgagtcaagagtccacgttcaatgactggcttgcggggcagttcttttgttctctacctcctcctctcctcctcctcctccttctcctcctacttttgcccattttccttgatgagcccctcttaatgctcactgttccagaaattgaaccacatctgattaaaacttaatggttactcacagaatgaagttggctggtagtttccaagcctgtttgtctgggttgctttgagtgtgtgacaatagaaattgttattttgaataaaatgtatctgagggttacagtccttaaactttgacagaacagtcacttatcacagatgtaccgctctattttccctcaaatatctttaaatttccgtgctcgaaattaaattaaaaaatttaaaagttttttttaaaaaagcatctcattttagaagataatggaaaatggtaaaggcttgccttagtcagctttcattctatatgtacttcctgaacccgttctctgagtgaagctctcttctgtgactgtgggccaggtaaggctgtgctcagacgagacctgactttgggaacttactgcctcatggtcaggtaaatccttcgatctccaaagggaaagaaagacatgctgtttgagtgatttagaaaagcatccctgtaaattcaaaagagagatgagctgattacctagctctgcctctgttacatgtgagtgtaaaatttaaattactttgacttttattcattactatacatggggaagggaaaagatatttgagtgtttatctttgtgccacatcctgtgctatgaactttatgtatattaggaagtaggtatctgtagcctcattttacaggcgagagaaacgtaaatcttaaggagctcatttactcaaggctgcaaagtctgttcttcctgttcatgggtgcagatgtaatgaagcacatgatatgaaccaattcatctggtatttattccacctaattacagtagatatccagaagaggagatggagtgttctttatctaggcccttcagaatgctggtgttgtggggtaagggcacacattacttttaaattctggaagccttataaatcctggaaggcttcacagaggaggagagacattcctttatcttgcagcacacccccttgagtgtgctcactgtgtcaggcaccccggtagggactggggactcagtgctaaagaggacaaagtccttctgctgtcagaaggtggtgatgatttcctggttgggaaagccatgggaagggagaacaagggtgggtatccaagcaccctggaggagatgaatcttgagtaaagtacctggcgaagagctcagctgggagtgacgcttgtcctggtttccttcctgaaatggaggactttgtgtgcagatataaggtggtggataaaatgtgtagggaggagcaataaggaatgcttttaggtacaacctgtgtttcctttttggaaaccccatgtagattgtgagctgtctcaaggttcctggctgcggacttctcactctcaggccacaccaagtggccagtggccacagtatctcaagcctggtttcttctctcatcactaaagatggcaaagtaaggtcacgggcaaaccttgttcttacagataaagcctttatgttaggcatttccaaaaaagtatttgcctcttctgacacagttttaatttacacagcaaagtagagagcctgctctgaggaaatacgactccccatgatgaatattagatattgaatggcctttaacatgtcatgcatgcattactgtgccagcttgtctttttctaaatgtcaggtcgtcactgttaattttatatgtttaaaagatttgggtgaattccaggtataacactttggttttcatttttacatttcatagtagttgaaaggctccatggtattcttgatagatgcttgtctgcgtccatattgatgaagaacagtagagtatattaaattaaagggttgttggctggttgtttggcagtgacttgctttctgttttctgttcactagaggatgcttggaggatgtaatctgcatactggttatcaatgtgaaggtttccctttgttctgtcagtaaaccctactggttaacagatccttgttttcaaccactggttttcagccctactgtggggcagagctacactgcagtgcattgtgagtattgctaagtaatttattattcattattgaggtaaagaaattttgacatacgttggagctgattcagcacaatactctcccatgtgttccattatgtctttcagagtgagaaaaaaatggaactcaaagacaagtcaaagaactgtatgttttagttagtaaaatatactattaagaaaaagaaaaagtgttaaggaaagaaatgagtatcacaaaagtcagcattatggttataagagcatcaataatattaataacttaccctttaatggtgcttatatcatgttctgttgtgagtgctttacatatattaactcatttaattcttaggataattctgtgaggcaggtataatttttaattgaaatttttcagatgaagggaatgaggcacattaagttagctcctgaggccttaaagatagcgcatggcaggaccgcagttctaactggctcagttctgggttttaaccacagtgtaggggaggaagggggcatagtggttgaggacacatgggatgtggtgggatgtggagtgctggcagtttcctaaaaaggaaacatcaggacccttactaaaggttttagttgcatttttagtctatatggattgttttagtccatttgggctactgtgacaaaattccagaggctgtgtagcttataaagacccgacgtttattttacacagttctggaggctgggcagctcaagatcaaagcactggcagattcagtgtctggcgagggcttcttaggtcatagttggcatcttcttgctctgtcttcacatggtggaagggataaggtagctatctggggtctctcttataaggggactaaatccacaggggcactcatcccacgaggccctgctttcatgatttaatcacctccgaaagcctcacttcctaatgtcatcccattggtgattaggttacaacatatgaatttgagaggatacaaacatttagaccatagcatggattgaatagatatagtcatatactatatgtttttatatatgtatatatgaatatatttatttatttgatatacatctgcatgaattcatactgtatttgagaaatggcagtataaatggcacatatgtgtgtgatatatatagctctctattcttgctgtctgatgtattcatacaataaaccccacagttgggacctacgcatctacctctagagaaagagcatattcacatatggaagcttttttcaaccctggaatgcccctacttctgtgtagcattcacatttatttgcctcttaaaaaaaaattaccaggctgggcatggtgggtcacgcctataatcctagcactttgggaggccgaggcaggcagatcacctgaggtcaggagatcgagaccatcctggctaacacggtgaaaccccgtctctgctaaaaacacaaaaaattagctgggcatggtggcacgcacctgtaatcccagctactcaggaggctgaggcaggagaatcgcttgaattcgggaggcagaggttgcagtgagccgaggtcacgccactgcactccagcctgggcgacaggtgattttaaatttaatccaaaattatatttaaaagaaaatagcttctagacatgtatgtgacctgccctttgtatgaacaaagtattattaaaaaactggaaggatacctcatggttgtgttaaaccagtctaaatttggttagaagttctaagagactcagttgaattcatgctagtatgtgttgtcttaagcctgagtgcacagcagtgctggcagaaccaacaaaagtgctgcacatgaaacaactaaaatggatttttaaaaaagctgttatctaagagttacctccaccaatacttaacgcattcaaaattaaaactaacaggagctagccttttccttcctgacagtgttagaaaataagccattctaaaacttacagaagattatcatttccctcttggatttagaaagtaaaaaaaaaaaacaaaatcaggtagacaaatgtttatgaaatggactaaggtttagtgacctgaaactcgttgaatttttcttgtaattgttgacagtgtgaatggtaaacagagacaattgctaacgttttatttcctttttatatgtgtgttgtactttcatgtcccatcatattgaagcaatcctgaaagtattaactgtttcttaccatgtctctctcagtgatactcaactcccagctgctcatttgagtcacctggagagttgggacaatggccatcctccatttccaccagagagcactcttaggcacttttaatgtacagccaagggtgagaacaactgagctcatttagtcctttaaccctggggttttgggtaatgcttgtctgcccttcctcttcagtccacagagctcaagtatatgctggacatcaggatatacaaagatacaggaagccaacctgtgcagtatggagacagtttgttaacttactggtctctggaggaacttctgagagaattcagctggctgtagtatcacctctacctgaggaaggatagggctgacaatttgctagtctctagctcttcttgaattgcttttgaagggtagaaatgtgtgacaaaaggcttatatatgtgtgggtttatacacacatattcctttcattgttgcttggataaatagagcacattttaaatgagaatggtgttaaaatggctatgaagaattaatttcacattagaaattctggcccaaattctgggaatttgggttattgataaatatagattgtattaattgtcgggtaagttgcttcttaagagttgcaatatcacaaatgatcaaaaagctgatgtttcaacctgtgcttatgtaaattaatcacaggtgtggaatcttgaggcttgtgaagaaaagactcctaacagtcaaattcaggcatgttttatgttatagaattaatctataaaaaatgaattctgatgcaaagctatgtgttctaattaatagtaacccaaatcaagaggctaaaattccattagtggactgaatgctgagtgacacttgaggagagtaaagtatagaaaatgtctctgttttgtggttactcatataaaaggtcttgcattaaagagtccagagatttatgtatcatagacaaggtcatcttgataatagcacataattctgggagcagacacatccccatcttcccaccccatatcacccctactgcaaagcatcactggaatcccaaagaggattccaggtaggctggcctcagtcctgactcttgacttgccatcatcctttctcgtttttgtctttcctgttagtttcttctgatacctcacgtgtcctttggtagaggctgtttcattttaattatttaatttcattttaattatctgccatttactaatgttagtctgaagttggcggtgatttgcagattctcagtagtagttctcatctgattggggggtggtgtctgcctgttttatagatgggacacaggcagagagtaatgtgcttaagataccaatgcctgggaagtaacatgcctaggttcattcctcaagctgtgcgattccagagcttttgctcttttcacaaaaattaactgggagacaagctgtgtccaggtggtgaagctaggtccaggagtacagcccagcatgtactcgaggtctaagttgtacaaaaaaggctgtaagacctttcaaactgatttttaaaataacagttttattgagttagttcatataccaaaaacattcacccttttataatgtactattcagtggtttttagtgtagccacagaactgttcaactgacaccactatctaatgttagaacattttcaccaccctgacagagaaactattagcatgtaagactaattttaaagctaacattattggagtagaagccaaggattgggctctcctgatcatcctgtgaactgagtgagggtagaaaccagttcctggcccaaccctgcagtgggcacagagtagacaccagtgttgactctcacagaatcctccagaacagtgaattctcaacttttgaaattttaacccagtcccaattttggtaaactaaaaaatctcactttactctgcccacttgttttatgaaaacaataggatttaaaattgttttctaagcacctatttgttttttgatttttctcgggtagatctgccaccctcattattttgattggagagtcattggcatctcaagacttctgggttattttcattgcaggtttgcttgaacacatgaaatgattcagtgcagtcatgagttcagatgactcacgcattaagcaatttcatgtgtaaaagtgatcccagccagcaaatgctaataacagccatttattattccttggatcttcctactcttttctttaacatttgtctttggccattgcctcctttctgttacctttttcatgcttattaaagtaaattgaataacattatatagcaatgtgtgttatttgtcttttcttcccagtgtgatataaacagtctggggctgagaaaatgggtagtggggtggggaaaaacctttaagaaggtaaaggccaggtgtggtgtctcattcctgtaatcctagtgctttgggaggctaaggtgggagaattgtttgagaccaggaattcaaggctacagtgagttatgtttctgccactccactccaacttgagcaacagagtgagaccctgtttctaagacaaaaaatgtagcaaatgtaacattgtcatggtgagaggaagaacacttctttttcctacttgagctccctcagtcaccttgactgacaacatctggaagcaggccagccagtgagagcttagccaagggaattgtatgggggcatgagtccaagtgaccatcttgggaataattctctgggaaaaaattacattttttttttttttttttggtgaaacaaagcatctcccttcttacattttattgataacaatttagtttccagtaatattacattgttagcatggtatataagtatttcaagttttgttttctctctctgtgtgtatataaaatttagaaaaaagattatgtcctaaaatgttagagtagggaatactttgttttcaaatgtaagtcacaaggaagctgtggttgagtatatacacttagtttacacattgtctttttgtatgaaatcagaaacgttggtagttctctttgtctataacttagggtttggggaagtttgttttgttttttagtttgagttaaaagccatgacaacactgaaaatgggttccagtaggtctacctccttttttccattagcattattatttctttttcattttttaaattgttcatatttctcttggatggtatcttttctgctttgaatccattatcagggtacatcatttattatcaacatttatgaagggccttttatttaattttattttgagacggagtttgctcttgtcacctaggctggagtgcaatggcatgatctcggctcactgaaacctccgcctcctgggttcaagcaattctcctgcctcagcctcccaagtagctgggattacaggagcctgctaccacacctggctaatttttgtatttttagtacagatggcatttcaccatgttggccaggctggtctcgaactcctgacttcaggtgatccacctgccttggcttcccagacagagtgttgggattacaggcgtgagccactgcgcccagcctcttggcctattgtttatgactatccttgatgtttcataggtgaaaaatactcttactttgaagagtccacagactcaccagggaaatagtaaaatttaaaaattaaaatgcacttttaagggccacaatagttaagtttgggaaaaacagatgagggggcatgtgttaatatttcagacaggatgtagacatgggggctttgggaggtgatgctggggctgatcctgaagcataggagtttgccagatgaaaaaagacatttcaggcagacaagtgcaaaggcagaaggtgaacatggtcatggtgtccccagggagctgtaagatacaattagggtgagggtacctatgagatgataactcgatgatgttggagatgtctggggccagatcatgaaaatcaagaaatctacaccagctaggagaaccattgatggctttaagcagaggagaggcactagtgagcgttactcaatgaacaatttactacactcatggcagggatgtagaggagaccttgaaggagtcagttgggccactgctggtgggagaggtcctgggctgggttgtaggcagcgatggggtttgtaaggcaaacttggtttctggctttgtctacaagattcttcagtggttccattgcagaagataggacataaagaaagattagtagatttgggatggtgggtgacatggacaggatgctttcagtcttgggaacctggatgtattcttttgctcccttgagagactgttcttggtagacccactgttactgtacttctgtttgtacattttcgtactcagttatccttcaattggagagcaaatgattggtgagcaaattaaattaaaagcaaacctcagtcagacacagtggctcacgcctgtaatcccagcactttgggaggctgaggcaggtggatcacttgaggtcaggagttcgagaccagcctggccaacatggggaaacccccatctctactaaaaatacaaaaattatctgggcatggtggtgggtgcctgtaatcccagctactcaggaggctgaggcacaaaaatcgcttgagcccgggaggcagaggttggagtgagccaagattgtgccactgcactctagcctgggcgacagagtgagactctgtctcaaaaaacaaacaaacaaacaaaaaaacaaaaaactaatctctgagttaagaatgaaactgctaaattaaataaaaagtattatgttatttttacatttttttctttaattagtgggttgggtgccatcgcagtacagaggtagattggaaagctatctttttttggaaacagagttttgctatccctctgttgcccaggctggagcgcagtgacatgatctcagcagcctctgccttccaggctcaagcaagcctcctgcctcagcttcctgagtagctgggactacagggacccactgctatgcccacctaattttttttttttttttttttttgagacggagtcttgctctgttgcctaggctggagtgcagtggcgtgatctcggctcactgcaagctccgcctcccaagttcaatcgattctcccgcctcagtctcccgagtagctgggattacaggcatccgccatcatgcttggctaattttttttgtatttttgtagagacggggtttcaccatgttggccaggctggtcttgaactcctgacctcaggtgatctgcctgcctggacctcccaaaatgctgggaatacaggcgtgagccccagcgcccggccttttgtatttttttgtagagacgaggttttgccatgttgcccagaaaattcctgggctcaagcaatccgcctacctcggcttctcaaagtgctgggattacaagcgtgagccactacacctggcccaaaaacagcacctttaattaaagaataccccttgctgttagcataattcttgaggaatcctagtaacaatcatgaaagaaatacctaagaagaatctttgagctagaaggaaacgtagtgacttgggccactgctctttctttatagttaggataaaaggataacagagaagggtgagtgagaagggttagtgacttctgagtgtcacacagcagtggtgcgggggcatgtctagctcatcggttcagtgttacctccatcgacctggatgactccctgctcagtcccatagagacgatagagctgagttgaaagacactagtgctcaagaccaccaagtcagcggtagacccagagttgcctaaattcttgactttaatcttattttaaattaactcactgttcataggccaacaagtatttgttgactggttagtatggaagggatactaccccaattattacacaatcagagataagtaagagactatttttcttttcaagaagtgtgcaggttaatttttcagattaactcattacaggactggcaaacacttatacaattcatggcttgtctgacataattatgggtatgtagtatatacacacacaaaaccaatgagaaaacgaggccacataaaacattgttcatttttcttttcttttttacctaactttattggattttgttttcttttgtttttttgcttgttaccttgttctctctgcacagtgggcaatcagtttctagactagctttagaaatgcctacatgctggtgggcaaacaataaatagaaccaaataataaaaaataatattgattgtctttttttcagtttattcttgttcaatcataattaggaagcatgatctggtgaaaatttttcttaggttggtaatgacataaatacttgcaggaaggtatttggtactttctgctactgctttgaatttaagcctagggtagaaatttagccatttctaccctagaaatggtaagagtgatagagaagtttctttttctttaccaagtttatgagcttgaaattattaatgctttttgtttttttttctttctttctctttctctctgtttctctctttctttctttcccttccttccttcctttcttttcctaccttcctcctttcctttcctttcctttcctttcccttccttcttcttttccttttcccctctcccctctcccctctcccctttcctttccttttccttttccctttccctttcctttcctttcctttcctttcctttcctttcctttcctttcctttcctttcctttcctttcctttcctttcctttcctttcctttccttctctctctttttctttcttttcttttgtttctttttttttttttttgacagggtcttactctgtcgcccagtctgtaatgcagtgctgtgaccatagcccactgcagcctccacctcccaggctcaagcagtccttcccccctcgccctcatgaatagctgggactacaggtatgtgccacccatgcttggctaattttttggagatgaagtctcacagtattgcccaggctggtctcgaactcttgggcttaaataatcctcctgccttggcctcccaaagtgctgggattataggtatgagccactgtgctcagcctgttttttctataattttaaacttcattcatgccacaaatatttaagtagtttggcatgatgctagaccaggcactggagatatagcagcacattgaatacacagagttcctactttcaagaggctcctcgttgaagttttgctaaatatctgtctagtgaaggtaaatagtacagcctaggagaaacaaaatgccagacactccattagaaaaccagaaaatctggtcctggcctggtgggtggcagtcttgcgaactcttgtaaaagtgcctgagatcatgagctgatgaaagcctgtatagtcttatgtgtgagtataatcaccaaggattaccacattcctgccaggcaacagttacaacacggatgtctcatggtaatgaggagagctggagtgctgctgcaatggggtgtacacacgtgaaagctgagccaaacagacagaaaggcgatctaattaccagagaagtctgattctgtttagggagtcgtgtgttgggggaatggaagaagtggccatttccttctttcttctcttccacttgttctcaatccctcttcactcaagatgctctgattcttcgctgagaaccatttggagatgtacatatagctggattaaagctacttggggttagcccaggacagcagactgatttcatggaagacattttttctacggatggagtagtggggaggaagaggtatggtttcaggatgaaactgtttacatcagatcaccaggcattagttagattctcataaggagtgtacaacctagattccccacatgtgcagttcacaatagggttcgctccactgagaatctaatgctgccactgatctgatctgataggaggcagagctcaggcctaatgctcacttgccagccccttacctctgctgtgcggccgggttcctaacaggccatggaccagtacccgtccacagcctgggggttggggacccctggcctgatgagttgtcatgaaactcatttctcactcaggaattgatttgactccatggaaccaccacagacctgttaactgggtaaaggctgatggaacttgaaaaaaatgaaggagaattagaaaaatagggggaaagtgtgatggatccattggatgtctatattgagctactagctgctctaaaaggcttatagaaaggcctcctgtgtaattggtaacatcagttaaccagaaaggctgtgtttatttccttcctaaactagttaatcaaagatttcagtgggccttgcatagggaaagaaataaggatagaaaagggagagagcaggaataaagaagagagagagaaaggagtggctgggcgtggtaatctctcactcctgtaatctcagcactttgagagactgaggtgggcagatcacttgaggtcaggagttcgagaccagcctggccaacatggcaaaaccccatctccaccaaaaattagccaggcgtggtggcatacgcctgtaatcccagatactcaggaggctgaggcaggagagtcacttgaacctgggaggtggagattgcagtgagtggagattgtgccactgcactccagcctggttgagagagtgagactctgtctcaaaaaaaaaaaagagaaaggagtgagtgacatgggttacttatgagtgaggagtgcatgtgtgtctgtcttttgtggaatctgatcttctctgaagtcacacctcatatctggtgagaagttgacttaagggggtattctattttagtctgtagccttcctgtttggtgtctggattttttctaagtcaccaccagtggaagaatgagtattgggctattagtctttcatgttctcttttcaggcttcctatggagccctttgtaatatttatttcaaagttgcttattattattattacttttttgacaggatcttgctctgttgcccaggctggagtgcagtggcatgaacatggctcactgtagcctcgagctcctgggctgaagcagtccccccatctcagcctcctgagtagctgggactacaggtgtgcaccaccatgccaggctaatttttaaattttttgtagagatggggtctcgccatattccccaggctggtctccaactcctgggctcaagcaatcctcctatcttggccttccagtgtgcagggattacaggcataagccactgtgcctggccctaaattgctattttgatgagtcaaaatggtcaaatctcagcaattttgcataggattcaacctaataattcaaccctggtaatcgtcacttctcttcttatagctgctccttaaatattgagtttacaacattagctaccatttattagcatccactgagtgccatgtacttcatacgtggcagctctgcaagggagtcatgacgcctgttttgcaggaaaagattacatgggccagggctgggacccatctcagaacctgttggttcaagcatggaaccttctttatgctactgtagcccactcactgcctttgttgcctcaagttttctccttgattcccttactttatatttctggcaggagtaaatgaatctttggctggacagatgaaagggattttgatggaccaccaaaccacttcacttgagggtttcgaggttacggagtgtaggcagattatcttcaaacgtgtagtctggtacttaattacactctgtaattaagtaaaccatagcgggccccttttgtcttagccaaattgtactttaaattctggaggagaaaggtgctctaatatttcggccaaaacattaggaaagcccatcttcactgtatttccactttggcctggttgtctttctaggctgtaaggcagacctgaatcttttccttaaaacatcttggagattttgtttttcctcatgctctgccctcgttccccggcttttttttcttcattatctagaagtctgacatatttgattcctactctgtctctagatatacacctggagagaacagtgtttctgtcacagaattccttctcaggatttcttgggaaatatatatgtttttccaaatccctagaaaaatcacttatgaggtaaatgggaaaaagtgttataatcctcctgtgagaattgtatgagtcaacacaatgacagtagaaagaattcactgatgtcaagttgaaagcaagaacaggaaaagctgacttgcagagttgaaggataagatccaccttttttggagccagtgcaggataggagcatgtgggagagaatgggtcatgatttcttctcgccgttgccatgttagaaatgtgtctttgtggcccaatctgctactaccattgatgtgtcatccttgcaaataaaataagtttatatgcatagcatactgtatacatatcctacgcttggtattgcaagaaataagttttagaagtaaactgagtctttaaattggtgacttcaacatacgaatctgtgtagtactgttaatttgcttgtagatctgaatgtaggttattgcagtggtcaacaaagtctctttctaaagggccaggtagtaaatattttcggttttgcaagccatacggactctgttacaactatcagttctaccatttcagtgtgaaagcagtcatagactatacttaaaatgaacaagtgtgcctgttgcaataaaacttttatttacaaatccagactgtgggctggattttgcccgctactggcataacatccaataatgttcactagcattttccaggatcttagtatttgctatgctacaattctttgtaaatcctactaagtgtgatagttcccatttaacaatgtttttggatatccaaataatgagtaaagaatgcaagtattttaagaagaatatattctggagaaattcctggaaattcccatttctcatggtcattcacattttcttatgtataatttgggaatagtataagctctcaatttcattgttaggattaggtcagacaatgcaagtaatgtggttaacacagttatagaactaagagctcactaaatgatagctgctataattagtaactagatggggagtatttaccccatttcatggaaaaggaaactgaaactcaggggttaaatgatttgcggaggtcacatttaataggttggaaaactgagtttggctgcttcctaagtccatgttcttgctaccatatcctgctttctgaagtagttctggttaatggcaattccacggcaagatacaccttgatttatttggtttatgggctgggtgaacagacagggagagtatggaatggttcttgaaagggtaaggattttcaatgtttagaagccacagtttctagaagccaaggatatgattgtaactaaagagctgagaaaacttgtcttgattttttttttcccctgttgcttagctgttgtgtggactgccaagagcttgtttgattttaagtgctttttatgcttgcctgttactcaggtcccatcatattgcaacaacttttaagaaactatgcatgttcttttaaactggattgaagaaaactgtactgtaatgttaaatgcccaaaattagagttagaaaatttgattggattttccttctccttcttcatggccatcctccaaccacctgcacaggaatgtgtctttgaccctttagggtcagacttttacacagcttgattagctgccaagaattgaaactccatcgccaaataagttggctaaatttttggaaaaaaactcagctcaatgaatggtttttgaaaatttgctagagtttactatatagatattcatttcatggcactgatttttttattttatttttttattttttattttttttagacaaattctccctctgttccccaggctggagtgcagtggcgctgatcttggctcactgcagcctccaccttccgggttcaagcgagtctcgtgcctcagactcccgagtagctaggattacaggtgcctgccaccacgccaggctaattttgtatttttggtagagacagggtttcaccatgtcagccaggctggtcttgaactctggacctcaggtggtccacccacctcggcctctcaaagtgctgggattacaggcatgagccacagcccctgaacaatagcactgattttaattagtgtgtatatctttttggggagttggtttttatattttcagtccctcttgggattttgaacacaacagtttttagctacctttcaggtgtgccgagcttgcctattgatagaagggtatttgtggggagatgggtgccaagtagaacatttgaagagttaagtatccagttcacgttatttcccattttaccaaccttgtctttcttatagtacaccacagttttgatttcagtccatggtttatttgagagtccaatgaattttaaaacaaatgttaaattatatttaacttggagatttaatttttatctagttaactcttgagtaccaagtatatgctaagtatcgtgaaagagggccaaacagtgaagaataatatgtgatctttacctagttttgaattggtttcgagaaacccagtgcatggcagagaattaagtgctaggttgttcgtcatatagaatataaataccaggggaattagaaagatctgggaaatataagaatctttagagaagactggacagaggcaggagaacccaaacactgtcttgaaggatgagaaggagttccatgcagtgaagatgatggggctgggatgttggatggcaaattagtagcacctttataatgagaaaaaaaaaaaaagagagagagtctctgatttttaaaaagagaatcagaaaaatatataccagtgtttattttctggcttatctaaacctcttcctaccagtacagtaactctcacttaaagacatggttgaccctaggcaggacagctgaacactggcctcctcttaaaatgcggttagactttggcagaggggaaagcagctttagtgtgaatctgccagatttccctggccccagcatcttggaaaataccagtatttcagcagtttgttctgaaactcaagggtttgcgggtgcgagtttgtttttaaggatgcccactttagaaatgcatttttgctctttcactttgctaagtgattgctgaaaaagacaaatttctggttgacctccctatggaagatagttttacatgtcttattcttactgtgccttacgtgtctagattttcttttcaaatagattgtgagcctcaatttaagctgaagtgaggaacggtttgatagtatctgtaaaacatttccctcgaattccaaggtggatgggaagatttttccccataattattgcagaatgctgcatttggggcttgttttctggttagatttatttacgtgaaggttttcttggcaaaatgttccttgaggttaaaaaaaaaggcgctgttttctgaaggcagtaagttcttcagtgttttgtgttacttaactatttgaatgggaaagtttggttctaataaaaatttcctcttcctttggcaaatgttgatgtttttcaagtcttcctaaaggaaaatggggcctgggtgggtttttgttttttattagttatctagagcctcccctcctcttcccttccgctttgtactccttccccaccattgttttatgagcctttgaaccagatctgtctatgccagagaattgttgcttgaaaatagaccaaaatcagatatatttgagtggatatacaagaaattggttactctggtatactggatgcctctaggaggggccagggatcttggaacgggagaaagacttttcattctgtagtttgtactgctcaaactttttttttttttttttttgagacagagtttcgctcttgttgtccaggctggagtggaatggcgtgatctcggctcaccgtgatctcggctcaccgtaacctccgcctctcaggttcaagcgattctcctgcttcagcctcccgactagctgggattacaggaatacgccaccatacccagctaattttgtatttttagtacagacggggtttcactatattggccagactggtcttgaactcctgacctcatgatccgcctccctcaaatgcacacaatagtacatgcagggtcaaaatttttgtttgattttgtgtgtggcaagggaaagagaggaaagggctagagtacatagtgtataggctttaaaagaacttgattttgaaatgtgctgactgcagatcttactggttttttttttttttttttttttttttgagacggagtctcgctctgtcacccaggctggagtgcagtggcgggatctcggctcactgcaagctccacctcccgggttcacgccattctcctgcctcagcctcccaagtagctgggactacaggcgcccgccactacgcccggctaattttttgtatttttagtagagacggggtttcaccgttttagccgggatggtctcgatctcctgacctcgtgatccgcccgcctcggcctcccaaagtgctgggattacaggcgtgagccaccgcgcccggccgatcttactggtttttgtgtttagaaaaatatttaaagaccagtacagatccataacctccacactcttcctatcagtgttttcaaacttttctgtacttgctgcacttgtagatcagctttgttttgtggtcctaattgaaaggcgtgccaaatgtgcacttcctttagccaccacattcacaactgcaggattttcttctgcttagctggttttctttcttctttccctctgcagcctggagcattggtaagcgtcacactgccaaagtgagagctgctggagaactcataatcccaggaacgcctcttctactctccgagtaccccagtgaccagagtgagagaagctctgaacgagggcacgcggcttgaaggactgtgggcagatgtgaccaagagcctgcattaaggtagctgagtaagctttacccaggagctctcagaacggcattgccagaaccagcagtgcagccacttcaacaaatcacttcttttaatactctttggcagagatcaaatctacagggtaaattctttgccacaaatgattattttgtttttttatatgaatccaatataagaaagttaggaccagcctaatagttcttagttctggcgttgccttcatagtaggctttgttgggtggatctgcacagctattctttaaatttggccaagtttttcaaataaatactaccagtgtttccctgcctataaaatgcccctgccatccttttcaccttacagggccactacattaagtttttcttttcttttgttttttttttttttgagacggagtctcgttctgtcacctaggctggagtgcagtggtgtgatctcggttcactgcaacctccacctcccagggtcacgcaattctcctgcctcagcctcttgagtagctgggactacaggtgtgtgccgccacagccagctaattttttttgtattattagtagagacggggtttcaccatattggccaggctggtctcgaactcctgaccttgtgatccacctgccttggcctcccaacgtgatgggattacaggtgtgagccactgtgcccggccctaattttttcttttaaaatagaccttatttcttttagagcagttttaggttcacagcaaaattgagcagaaaatagaaagagttctcatctatctccccaacacctcccctactgtcaatatcccacaccagagtagtacatgtactacaatcaatgaacctacttcgacatatcattatcacccaaaggcaatagtttacattaggctcagtcttggtgttgtacattctgtgggtttggacaaatgagtaatgacatgcatctaccattataatattatagagagtagtttcagtgccctaaagatctccgtgttctacctattcatttcccatccccactagcccttggcaatcactgggctttttgctgtgtccttgcatttaccttttccagaactacattttaataatacatttcccgtggagtgctttgaaagcataaagaagccttgagccaggcatggtggctcatgcctctaatcccagtgctttgggaggccaaagtaggaagattggttatgcccaggagtttgagaccagcctggaaaacatagtgagactccgtctctacaaaaaagaaaaaaaaaattagccaggtgtgttggcaggttcgtgtattcccagctacttgagaggctgaggcacatggattacttgaatctgggaagttgaggcttcaatgagccgtgattgcaccactgcagcccagactgggcaacagaacaagaccttgtatcaaaaaaaaaaaaaatgtctcgctatccaggatgaaatgcttttaagagtatgataagttatgggggtaatatgaatacctacttggaatagagtcagtaagatgttttgtgaggggaagcctgaagtgcaaaatgttgatgtgtgtgtctttctgaatttaacatttgagttgctcagatatggtttgaaccatgtatgtggagacagaagcaagggattggggattaaattctgccagggttggtctgtgcagcctccttagatttaacgcttttgaggaaagtctctgatgtggctgttaggtgcattctttttaaaggaaagtccaatgtattattataaaacagccttattattattattattattattactattttgaggcagggtctcactctgttgcctaggctggagagcagtgatgcaatcatggcacgctgcagcctcaaactcctgggctcaagggatcctcctgcctcagcctcccaagtaactaggactatagatgtacacaaccacgcctggctatttttttttttgtcgtttgtttttttttttggagacagagtctcactatgttgcccaggctggtgttgaactgctggcctcaagtattccttctgccttagccccccatagctttatattttatgtaaaagttaattttgattatttcatttcagataatacgaaacagtataaagtatagccatatatagagataaaagttcttcccttctctctttcacctttggctaaaatcttggaatacaaactttcccatttacaaaccttttcttatacagatatttttatatacaaacaaatatgcatattaattatgttaaaaattggtggaacatgaccatacattctattttacaacttgctttttggcttgacttggtatattgtggatatttttccttttaagcagaatttaatctcagggtgagtaatgcctgcctagtgtcccttaaatggctatactgtaataatcaccagtcctcaagtgagaggttagttcataatttaaagggggtaggcgggagacctttcacattagggacaaaaccaaggccatgactgttgacattggacttttggtcactaaggatgtatgtttttattttccaaggcagacgatgcacggcttggggctgctgccaaggtgtcagttttgtgaaatttttattttttggaggctgttaatatattagcatagttgttagttctggctaccatcctttgagcattttgagacacttctatgcccatttaaggtggtgtgaggttgaattagttttaagaggaagtaatgaataacagaaatggaattaggagacagactttattttgtgtatatgtttatttgagggagaaggagatgatggctgtagttaattgctacccctgtgattcttaattatgaaacagggttaaaattgttcagctcagtagtttcctaatgtggttaacagtgagagtcaccagagaagttttccggtatctggtgttggcaatgaatatttgtatttttcttattttataaagtatttatttttagaaaggtaatgtaattaatgtatacaagattaaaaaggcacaaaagagtgtagagtgaaaactaagtctcccttttctgtctcccaagtacccagtggcccttctagaaacagccactgtattaccattttcttgtgtattctttcagtgatttcagagtatatataatatacatgcatataatatacatgcatatattacaatttttcttttacacacatggtaacagtatccacggttttatacgttttcttattgaaataatatttcttggaagttcttccatagtagcgctgcattctttttatttatttatttttttgagacggagtcttgctctgttgcccaggctggagtgcagtggcgccatcttggctcactgcaagctctgcctcctgggttcacgacattctcctgcctcagcctcccaattagctgggactacctacaggtgcccgccaccacgccctgctaattttttgtattttcagtagagacagggtttcaccgtgttagccaggatggtcacgatctcctgacctcaggtggtccacccacctcggcctcccaaagtgctgggattacaggtgtgacccaccgtgtcgggcgcattcatttttagtaaatacctggtattccattgtagagatgtgctgtcatttacttaacaatattgatgggtatatagatcatttccagtttttattatcgtgaacaaagctatagggaataactttgaatatacatcatttcaaacgtgtgagtgtatctatgggatccatttctagtagaattgctgggtcaaaggttatacacattataattttggtagaaatttattgccaagttgctctgtttatagaccttgacagattttagatttaacaacgatgggtgagaacagttttctcatgcccttgcctgtcaagtatgactcccaagtgattattttatttatttgccaaagcaataggtaaaaaatggcagtttaatgtgctttaatttgcatttttcttagtttgattgagattgagcatcttttcataagtttaaaagccacttttatttctagttatctttctatgcttgtgttcgttgtctattttgctgtttggttatgatttttattatcaaaatatgacatcaaaattattggtcccccctttttatccttgtgatatgtgctatttatatttttctccgttggccatttgtatagaaataattattactttgttgtgcaggttattacaaattttatatagttaaaatcaccaatttattcaagcaacaattatttattgaatgcctcttgtgtatgagaacttgttctaagcaccaggctatacagtaatgtaaaaaacagaccctaattcttgctccacagcggaagttacattcttacttacattggaggaaatgatcaacatcctagtatcgtagttaaaagacctttcatttttagatttaaaaacttactatctcctggttcattctaatgtcatgtggggtttttttagattgaagtctttgatccatctgaaatattaggtatgaattcaaatgaatttttctctagatgctgtattaattagggttaggttgaattgctgtaaccaagggactgaaatatgctatggttcaaagaacacaaaagtttattttttcttcacttaacagtccctgtgtaagcaaaacaggtcagcagaacctcccacatccactgatcattcagaggcttgagttccttctgtcctgtggttctagtaattgttgctgtgattatctgcatggtcatatctgagttgctgctgtatctgggtcctctccatgggaagggcaaagaagaaagtccagggctagtgatcagaaacggcagacatcactacagatgaaaactatagtgatgagaacttcattatatgggtacatctagccgcaatgcagactgaaaagtgaagtctgtgttggccgccttgtacccaagaagaaggaaagaagggattttagtggaaaattagcagtctctgccatattggctagtcattccaattttactgaacagtcccaacttttctcctttggtttcttttatagtataaattcccatatagattttggtctatttctgggataaccgtttagtttcattaatctgtctgcctattcatgcagcagaatcgcattgttttaacttttgaggcttagtttttttttttctttttcatggggtaagtctccccattttaagtccatttcacagaattttattacttgtgtgtgtgtgtttgtgttttaaaaataggaactttaaaagaatcatacccagttaccaccctctccccccatgaagaaaacctattatttttgggattttgttaaatgtatagacttcattagtgaaggttcactctttatgatgttcatttttcttatttgacaatagtgttgcacaattcctttgaaaaacactgatctgaaccctagactttctatatcctttgacccatgacacttattgaagtacgtgggaggaaggaccactttatatgatgtgttaattttattttaatacatgatttctgattatgaccaggaaacatacttattttgctattctattaaaaataaacttggaacttgtaaaaacaatttcttcagtttgaagataaggaagagttgatatttcagaagtgtattgcacaaacttatttgtaatgtaccaacctgggctaattgtttgcgtatatatgatgcacagtgcttgttacttgcttagtgtatgtgtatgtgtgtatatatttgtaacaacatgtattcagcttttgtcctttcctttttaccttttttaatgtaaaataaaacacgaaaagaagcatacatagtttagttaattacaaggtgaattttttttgtgatcaccatgcaggccaagaaatagtatattatgtagtatatacactatagtaattgcctccttgccttttttttaatgggtccatcaaccaggtgttcagacctacagattggtctcgtattatctctttatgttttgtaagtctcttaaacctggggtttccccctccagccctttctttcccttacagtttctctgttgaagaacctggccatttgacctccagcttctttcttgctagattttggtgattgcatccacatggttcaattcaatttgtttttcttttagtggcatatgttatattaacaccacaatctgggcaccagggatgctcactgctactgagtgggtccttatttctaggcccgtttagtggaccgaaccaggaattaaatatttataaaatacttcatgagttcattctgatactttgtgattcaaattcagtttataaggttttaacttaaccttttctatataacatctttatctcctttatttgacacaaaattctagtcctcaaacacaacggggtgatagaatacttcataggtacttatttgctttcttccacattatacacacagtattctcagaagtgccacaatgctaacactatactgctagttatgaaaactgaaaacaatttcttttttgtattctatttccattctccttctttttgttgttgttgttgttgttggagggtgttttagttgttgaaaattgggcagatttaacactgattagctcttagatgatatttgaaggaggaataattttaactttgttgggtgagatgttgggttttagttatgtttagaaaaagtccttatctgtcagagaatttgtgggtgaaatgatatgacatctgtgattctcattaaaatacctcaggaagaaaatgggaatggaggaaataaggctgcttatttttgaaactgggggtagaatgttgcttatttttgaaactagaagattttaaaagaaggcatattacgctttctgtttctatgtaacttgaactatctgtaataaaaaatttaaatattaattttataaacagtgaaaagaaaagaacatatggggaggagggtaataaggaaagaatagacagggagtggggaaatgactaaagaatgggtgatttcattctcaacctggtggtccagcctggtggcctacagtggttcccgagtctaagaaaacgagtaacatcttgagtgaaaagaaaaggctgagctgtggggcctaaaccaagatttaaggcatgagtgacagaagaggaagcttctatgcaaggaaactgagaaggatcaaagcattaaaagtaaagatacctgagagtgcagcccacaaatcccagctagggaggaagccaagggaagaaggtggtcacaacaccacatcctacataatcagtgagtgagacctccttgtcattctcagcatcacccgatttgctggagggtgggggattcctaggcctcgtcacagatcaaaatctctagggggtgaggcttgggaatccatattttgaggaagctcccttgtgaacctgaaggataaggtaagactaaaacgacgtagaaccttaacaaggggtatttcactggattgactaaggcagaacactgtggactgaagactggatgggggacatggaggaagcctgtgtagttgctgttctagaaagtgttcggtgaaaggatgaagagggtggatattggagaccttggggctgaggaggtggtggtagttgaaattgttgcttatgatgatgtaagagagattgcctataaatgggaaggatgtgggtggttttcagtgcaggataactgagtagtttggctacacatgtgcttaggccccccactgccagagagattattttttggaaagagagatttttgatggttcagggaaagcttggaaatgttcatcatggattagatgtttctttcacttgttagcattttgaattacatattaagggaggagaggcctcaaagccttctcagtgcctttccttctcaagttcttattgggcctttctggcccatccttgagaaagaaggaaggaatggggcctggcacactggatacagggacccctccctgccacctgtcccccatcatgttcttacagttttctctttctccatttccttgcctcatgttaaatggcagtcttgtatatgtagaacctccttaagggattgcctggtacagagtggtgtttttcagtcattatacttttggactattggaaggattcccacgtttccacaatgatttcataatcacagtgtttgaaggttgtggacaaggactgaggtgagaatactattctcctcttttccactgccttggggtctttgttttatttttagttttaattttacatattttttagagatagggtctcactgtgtcacctagtctggagtacagtggcatgatcatagctcagtgtaaccttgaactcctgggctcaagtaatcttgtcgtcccagcctccagagcagctgggactacaggcccacaccaacacgcttggccaattttctttattttttgtagagatggggtctcactgtgttgcccatgctggtcttgagatcctgggctcaagtgatcctcctgcctcagcctcccaaagtgctgggattacaagcatgaaccactgtgcctgactgcattttatttttaataacagatcaaattcataattttctactctatcggctttctacctttgtgttcttgggcgcatcacctatttttaagatttcattctttctccctacttcatagagtgcatttatttttacttttaacattgttttcttatttaggtcagtgagtgtttctggtcgagtgggtggttttttggttatatccgttctccagtctctctccacccggtatccatccagaacctctccctgcctcctctccctgtctcctccttgttttctgttgtggttacttggatgctaacccattcaacttgtgcactgaccctggtacatggctcgttttctttctcatgatcatatttatacttttgatggatatatttaaatgaacagctgtgtgtttgttgagtcataccacaattatctgattctgctttagctgcttgactggcaaaagcatatttcaagctaaattgtgagagaattccattaatcacattctattcgggggaggggagaggagacagaccactaagagaattcttttccaaggttaatgttaattagtgattccattatttagagtaggttgatctggttgctatttaatgtgtgacttggagaaactttacaaagtttaaataactgtaaaaataactatgaaaggtttaatgataacagccgtgtaggcaaaattccttggaataaattgatgtgcagataaagttagttgctgctgctggtctatttaaatagataaggggtctttcaagagttcctttttgtaaagaccagggttcttgcctcacattgctgtaattcattggctaagtattttgtttgaagcctcctgaaaagataacatctaattcagaaatgttactactttctgtttttttttttttttttaaatgtattactgactgttacctctggtcaagtctttggcttccatcagccggatctatttttctcctgacacttccttggggttctctctgaaggttattaataggcatggaagcatggctttccaaatagcgtcaataaatgttagaagccttcaggggagataatatgtcaatttctgacttgtaggagatgtatattcaagagacagacgctgtctcagaggtcattagggatggctctgggcctatcagctggtgtctgcaactagagatccaagcaatcccttccaactgggatattgtccaccagggagttgtctggtacacccaaggtctgccagccgtctttttgtttggctgcctctcttggatgacacccttgaaaactggaatccaagttacaaatgatatcttttaatttatctcaaatatctgcttgctactatattaaactggggacatacaaacccacccctgccccccatttccttgctaggctatataaaacttaaacttcaccttcctctctccacaccaaagtgtagccaaggctaagatgttaaaatgaatatgttttaatttatattgtgcacctggtaggtgccaagcatgagtatgtagccatgagccaggcagagttcttactctcatgttgcttacattttggtgtgtggaagagggagaaacacaataaaaaatttatttattttattttaaactagtaagtaagtgacaaatctcacctagttgttaagtgctaagaagaagatatggtgggataatatagtttatgggggtgggtgagaaggtctgagacaggaatgggcttggagtgtgggagtgagacggaaggctttggttaggccagtgtataaagggtggtgtttctcactaccacagaaaagtgctccagtgtctctcagtaaagacagagagagagagggagagagagagagagagaaagagagaaatgtacctctctggccttgacattcctttcatcttatacccacccccccccccaaattattatagattaatcacattagcctgagaattgggacagctgtgtcagatgagcagtgcttctaacactgtaagtcatgggagggaaagaaaggtctgcactgttaggttagaggggaaacgtcaggtcaggcacagctagaaatgagacagaggactgagacagtgtctacctgaggactttgggaagaagcgggatttgaaatgaacttcagaattacatatctagaagagctttatgggaagggataatggggcttttcctaccaataggtaaaaaaaaaaaaatggtccagtcacagtttgcaaacaagggatagggagtgagctgtgagctgcgttggagaatgtagcaaaatagcagggagatgatggagtcctagcagttgaaacaaagcaggtggaccgtggctatttgaaacaaaggaatgaagtggaaaacgagggacagtctccatatagtcaagcctggtgaaataacacctagttttgaggtacgagtaaggcacgcagcaagtgatcaaaacactggattctcagaaatttagtgtaggtattctgtgtatatctggaaggggtgtaacaaagtcaatttcattctgtgtacagttaaaataaatttactggggagcctttgattcttacatagtagcctaagctagacctttcacttcctttcacattaagccttatctttttttcatcttttttcattttacagatcatattgtttgcttcccttccttcccaaaccatatctagggtccatctgttacagctggaatgtttatagtgtaactcagtcaaaacccattctttcctgaaataatccataattatttcctctaactacaggataaacggatccagggcctggttttcagttctataggacttgtccaagaagctatttgtattcatctatcatgaaagatcaaattacatgctaatattctgaaagtaacaccccgccagaaaccctccagcagcagtgaagtctatataaaaccaagccttggcaatttgcacattgccagttccgacagagtgtggtgttaaaaatatttaacaggtcatttttgaaccgtagaaaagaccctgacttaacttacatggtatgatagcttcggtttaacctttctttgcagctattactgacagcccatgtctcatttcactcctcccaaaggcccaggtagtttggcacaagctgcctttgggttagctcattgccttttgagcatagaagagatatgactgttcttgtattatctaatcagttacagtggctgattttggcccctcttcgtggtggttgatgtaagtctattttccttcaaagtttcatgtctacaatttcccttgctgggcctaactttgcccctaaatatgccttacactaatttccgtttttattttgaggggtgagtttacaagagaactgaagagtagggatggaggatgggggctagaaaccactgatgcactatcaaagaggcttgtttttttctatgatatcaacatcttttctgggggcagtgggagggaggagatgattgggggtcacagagtaatatgaaattgtttaaggttagggaaatggaaagaaggcatgattgaatggtgtattaaataaccatgagtaaaggttgttctttaagaggaaaataaagattttcagttgaagttcagaagaattgaggcttgaataaaatgttaaggatggcggagcatggtagctcccacctgtaatcccagcactttgggaggccgaggcagggggattgattaagcccaggagttcgagaccagactgagaaacatggtgaaaccccacctctaccaaaaaatacaaaaataattagtcagacatggtggcatgtgcctgtagtccccactacttgaggggctgaggcagcaggatcatttgagccgaggaggttgaggctgcagtaagctgaggttatcccactgcactccagcctgggccacagagcaagacctcgtctcaaaaaaaaaaaaaaaaaaaaagaaaaaagaaaaaaaaaacccaaacaaacaaacaaacaaaaaactgttaaggatgacagaacaagattgctaaactgtggctagctagttaagtgaaagttgtgtagagtggtggtgggttaagacctgaatgttctgatctggtggtttgcggtttgacctgtgtccttaggcaagtttcttctaccttcccagaagactaagaaaaagcaggattccataaattatttttccacattgcctctgccttttatattaaagagaattattattttttccttatggaaggcatagtacagaatgcctaaagatatataaagaaaaaaactgtgatggaatcatagtgagagcccttaccaatggtgagcaagcgtaggttagaaagtgtcttcacgtggatgatgtaaaagtcattcaaaataggggtgggtgattgtatgacctgtcttccaagattctttctaattcacagattgttagaaattgaattgagaagagtatcaggaatgtccttattgaatgaaggtactcactaaagtatgtgttgaagaatgagtttaggccatcaggcaagataaatgaacattttgtcaaattttccaatgggaaagaattttagagttcatcttacaactttcccctcatcctcaatattatagttaactgtatgctacccataagtctagttttcagaaacatgctgtattatagattagcacttagattgcctgatatgggttctgaaagttgcatatagaagtgtattatattctcagttattctgtgaccaataccacagtaaaattttgggtagtacattgtggggtatctgtggctttatctagctgtaaaattgtgatgagcaaaaaaagtgccaaacttggtttcaagcccacatacattagaaattgagctaagcgctagcttcttaactacatacagtctgatctttaagtggaatttgaaaagtaacatgggatttggaaagtcgttttgtactaccctggtgatgtgtctgtttttagtagaatatcatgggaatgttctgtcttctaagaaagtaggcctgagacattgtaagaaacagtattgatttaaagagggtaccttagttaaggcaggaggtctctaaccattttctgaatagcgatttttcttgtgtctgacatactaaaatcagttaccagggatagacggtcttatccaagaacagaagggagatgtgcgtacacgagaggcacggattcatactctgaacccttcagataatattttgcagtccccagtagcctgtgatttttcagttagagattttggcattacagccttgcacaaggatttagttgaacccaagcaagatatgcagctatgactaccttcatacaagtttatatcccatttcaaaaatatttagctgtattcataaaatattattccaacattaaaaaaaattaaagctttcttccttgactgttggacttgttgacgtctgtgatgttagagaggttaatgaaatttctaaaactgtagaacagtgtcatttttgtcaggtatccgctaagtgctcagtctaaaatatctggtaccatctggttatctgatatagtacaaagactgagcatttaaggactaaggcagttacttgaagtgttgtccaagaactccaaaggcgcctgagactttctcaggggtttcacaaggtcctccttcttccaatgatatgtgtgatactggattttctatatatagttcagccagtacatgttgtaacagaatgaatgtagatcatatatgagaatccagctgtgttttattgaacagagattttctaaaaagcaggaaaacaatgccacttttctcataacatgttttttaaaaatacatcatagctcttttaaaataaaaaaaaaataaggtagtatgttattgttattttattatgaatataatattttaaaaattctgtttaaatttttaacactgtaaatatcaagagatgtagcctacatacacacgcttctcagtaattttcaagagtttaaagagattctgagaccaaaaacatttaaaaaatactggagtaaggcaatcccagaactattgaattattgccactcccattttccactactagtttctctttcttgccaacttacatatgaacgctccttagccaaaaatatttgagagcaggagagttgaaattttacttttaaaaatgcaattttctttttagtatattttaaaattaaaaatagatccttgggacttcgggttgagattttagcgtattgatgtttcttataattgaaatatggtcaggaaataccagaacattcccctttccacattctttttttctttccttttgggggtgctgtttttaatagctgagtttactggtcaggataagcactgcagaccctgaacaaaatggcaaccagtaagttgacttttttcccaaagatttttggcagattttgagctgtctttaaacactagagacggaattagtccctactgtttgagggtctgaatttataattctttttctgtcttctatttatgagcctaaattattgttttaattttgttcgcacaatgataatctgttaataggtatttgggacgtgggcttttgctggctttgtgacgtggaaaatatgccagtggtgattgtttcttagatttttttttttaatagtaaaaggagtcttgatttgaagcttgttaactgttgacttttactattacttgagctaaattctacagattaaagttatagagatgataaatctcttaatcttgccattcctttgcaggtctctctgtgtgtgtctgtgtgcatggtggggaagggatgctactaattctttagaatttaaacttaaattgagttgattaattcaggaaaaattctaattaaactgttattaaatgtgcacctacttggctctggcagtgatgaacaagatagactatagattttcctcccgtggaattcacagtctagtgacagagacagatgttcaaaagcacacacagttatgaatacataattattaattaggatgatttgtatgagtgaaacttaaagtgatctatgagaatgagcagagagtacttaagggtttagacaggcttctagaaggtggtagcctttagagaagccattgagacttacgggatgagtaggaattcagtaggttgggccctgaaagaagggcccaatcatagggagcatcacgtacagatgtccagagatagacagaaagtggctggtgggggtgataataatgggtagtggggactgaggaactatggaatgatggtgagagccaagggggcaatgaagataggtgagtagagtgcctagagtgccttacctccgttctgacctttgccttcctctctagccttcttgggtattcgccgactctttgtgactcttccagaccctttgtgtcctggccattcttgcgttttttcaatcctgaggtttgccctaagtcctcaggacacaccatgcttgctctggccacaggcacctcaatagaagtgccttttcccttaaatattaccctatctgtgtcctgtattcaccctctcccaccacacctcccaacacacttacccttttcctagtacctctactcatccttctgattcctgattcttttcagatgttacctccccagggaacctctgcaccctccagaaagtctcaagttgttttgttaacacagttattttaactatgtttcttcccaactcttattcagtttttaattatggaatcttggatgattatttgattaccaccatagacatatcttgtaagtgccacgatagcaaggaccctgtttatatttactattttaggttcctaatatgtagcacatagtaggttttgagtagttcttgaatgcatgaatgcattaatgaaggactgggaattcagataagactgagataagaaatagtttagttcagcaattttcaatggtttgtgatgacatatcccataaaaagttttctgatgcaccctcaatgtgtaaattggccatacattttatataaaataaataagtacatattataaaacatacataaaatagcaattaaataaggataaaatatttaaggtgttgctaatggcagtggaatcatactatcatcaatgaaagtctcaagccactcaggataatgtttactatctatgacagtagttgcaaatccgtttttcaaatattttcaaattttgaatttggggagattgtttcatgtcagattgaactgaatattactacttttctctagtaaagtggttaaggaagaaccagtagaaataagcgatgttaagtctactgttttcttactcttctttggtgcttgcattaataatatgtgcaatctctagtttctgtaatggttttagaacacttgtcatttgggaaggctcatttcactgtaagtagccaatataacctgtaattccacttgaacggaccttcagaactacaagtacatggttgtactctgtaaataaatcatgtccacgctaacattatgtaactcctagtctttctgaaagatacctcctgtactagactgtcatagagaactgagatagagaccagattaagtctcaagttattttctactttattagattaaaacattcttatgaaaaaacagtttaataatttcattccatagctcaatgaatgacccttgcttggtccttggatgtgcatacctgttttggagatgagtggaccagtgctggagactgccctagacagatgattatgattccatgccgggggctgatatcactgctgagggagaggtttttcaccaagggcttacctttgagccggaatcatgtatgacaggaggaggcaatggggttggagaggggtggaggagggggctcagggcagttcaagcagaggggaacaaaaagcatattcatgtccaaaggtacagagatgtgttggaggagtcacattctggttgtgaggggccaagatgaaggatttgtatatccccaaaaggatccactataggaaagatctatgtgaacatggaaataataaaaacaacaacagtagtaggatcttcctcaagtttcatatgcttttaaaaatagaaaaggaaggtaaataaaaatcccctttacctcctcccttaccttgcttttaggaaagggattgactgaactataattatggaaccaaagagaaataaatttaagtgaagggtggtaagatatgatggaggtatggtttgtaaacagaccgccagccaaaaaaattgatttttttttaattttaaaaataattaaaaacaaatagagatggggtctcactgtgttgcccaggctggtctcaaactcctgggctcaagtgatcatcccacctcggcctccgaaagtactgggattacagctgtgagccaccgcacccagcctaaataatttgattttaaaggtcaacactccagacatgctagatagcaatgggcttccactctttgctttaaagctgaaagagtacaagcacactaacctatcattaaagaactttaccagctttttgtttattttaccatccagaaaattgcaactaaccaaactcccatcacattcctgatgtttcacattattcaaatggaaaagtttgtttttatttttacatgattttagttgttgtctatccttgttaaatttgtttaatgcagaaatgcattgctttgccttagatggggtaaaagtttgtatttttttgttctttgtttttgctgtaggtctgtatgttgatgtaggttgctctgcctccagtccttttaaaggagaagtaagactctaacatagtaatttggcttgaattattcagtcgtttaatccttaacatcatgttaaaatagtctattcatgcttctcaggttttttaatttagtaccaattttgcattcaatggggtaagataaaattcaaacctaaaatcttttgggactgcctcactttgtagctgaaaattttttgtttccttattgatttctttgtaagagagtagacttagaaactatccttggagtgactaccagttagaagtgaatatgactaactctttaaagtgatatgtttaggtccacataaaaggtatgtgtttaaatgtagtaagaagtaaggcaatatatctgagggtgattagtaagaagggccttgaatggcagtttgaaggtggtatgcttaatttgtcttcctgcagttagatatttatgctttacttacatctcttcttttccctttacagttgtacaatggtagatggagtgatgattcttcctgtgcttatcatgattgctctcccctcccctagtatggaaggtaagtgactcacatctttttgggttaagataagtatactgtgatttttttttttggcttactataaactacttcttaagcctatcaaacttaaaacactctttttataataaatatttggtgattattgactattttgaaggaaattcttatatacattatatctgaatatttacatacacctatttttttaaaaaattcaacctaattttctacttaaaataaatatagggccaagcatggtgcctcacgcctgtaatcccagcactttgggaggtcgaggcaggtggatcacctgaggtcaggagttcgagatcagccagacaacatggtgaaaccctgtctctactaaaaatgcaaaaattagccaggcatggtggcgggcacctgtaatcccagctacttgggaggctgaggcaggagaattgcttgaatctgggaggcggaggttgtagtgagccaagatcacgacattgaactccagcccgggcaacagagcgagactctgtctcaaaaataaataaataaataaaaatataaaggagaaataagagaaaattctgtaattaacaataaaacatgtgtttaaacaaatgcgaggctgggtgccgtggctcatgcctgtaatcccagcacttttggaggccaatgcaggtggatcacttgaggtcaagagttcgagaccaacctggccaacatggtgaaaccccatctctactaaaaatacaaaaattagttgggtgtggtggtgtgtacctgtaatcccagatacttgggaggctgaggtgggaggatcgcttgaacctgggaggcggaggttgcagtgagctgaaatcacaccactgcactccagcctgggcaacagagcaagattccatctcaaacccccaccccccaccccctccaaaaaagcccaaatgtgatatattatggtgtagttgggcatgagtctacaagaagacatgatgaagtaatacatgcttgcacctatataggtaataatcttcaacatcttcgaaaatagattggtactggtgtgttatattggtggcttagttgtcataagtggtctcttaccttcagtgattgaattttctgaattggtgaacagattttggtagaattaaaaaaaaccagaaccgttggcccttgatttatatactagttatatgtttggaatatttagtatacatgaaggcagtgtaagacatacatactttgtgtttttatgtatgacagggttaggtgctggtttcaattctacaaagattattcatgaaaatgaatgctcggtgggatagttgatacttgtagtgcaacggccatgtcttggcctatttgggatgttacaacaaaaataccagaaactgggtggatcaaaaactaaacatttatttctcacagtcctggaggctgggaagtctaagttcaaggtgctggcagattcagtgtctggtaagggctcgttcctcatagacggcaccttctctgtgttgtctcatggtagaaggggctagctagccctctgggatctcttttatatcagcacaaatcccaatcctgaggggtctgccctaataccctcaccttggcagttaagatactcgcatgaattttggggagacacaaacattcaggccctaggagtctaattcttagttgtgtggcaccacccaggcatttcagtgcctttggcatctctgacccttgcttacttactttcattactcactttcccatcccctcatttccaaaaagttgctcagggatggtcctgcccttgttgaaaaggacaaaatagataatcaagagagaaagatagtaaaagttactcatcattcccttcacttacatgtaattgcttttaacatgttgttatatatctttctagatagagaaagcctaaactctactctattgcacattgagcagtgcccactttattttacaagtgttcctccatgaagagtggtgcttattgtaggaatctcaacctctttatgatcagatgggacagtaagactaatgcccttgttacaggttctttggggtatggtcttctttatataaatgatgagtttccaaggaggcatataatttgacaagttagtatagccaacaatgtgaaaaaatcagtacttagaatattatacatctatttcattatatattaggttcataatatttgatctgttcctatctccttctcatacttaatgacatatattatacttctccattgtcctatatggtagctgatagtcacatatagcatttgaaatgtggctaatatgagtggaaatatgctgtaaatgtaagatacaagctggattttgaagacaataaaaatgtaaatttcacctgttttttcctactgctgtgataaaacttaaattacattaggtggctcacattttgtttctgttggccagtgctgttatagaccattttagatatctagtttatattccactctaagcagtgttgttaaagatattcccataatatggcagttgtgtcagttagtgccaagaaggtatggggaagggatcctgagtggcaatgttgaaggaattaatacgaggaaatgggcttatattaaagctgggaggatttggtgagttaacagtgatttttcaattggggtagttttatcccccaggggatacttgataattgctggagacatttctaacagtcaagtttctaggactttttttttttttacctcttttaaattggtaaataatgattattatttaaaaatctaaggaatattgagaactaaagtccctccaaatttcactgccttccttagttaccatatcaattctatatgatatttttgttgttacggttttgttgttgttgttgtttgaaacggggtctctttcacccaggttggggtgcaatggtgtgatatcagctcactgcaaccttctcctcccaggctcaagtgatcctcctacgtcagcctcctgagtagctgggaccacaggcttgtgccaccacaactagctaattgttttgcatttttagtagagacagagttttgccgtgttgcccaggctggtctccgactcctgagctcaagtgatccacccacctcggcctcccaaagtgctgagattataggcttgagccaccttggccggctatcgattctgtatgatattttgccttttaattttttttttttttttttgaggcagagtctcactctgtcaccagggctggagtgcagtggcacgatcctggcttactgtggtctcaacctcctgggctcaagcattcctcctgtctcagcctcccaagtagctgggaccacaggcagggaaccatgcctggctaacttttgtattttttgtagagctggggtctcactgtgttgcctaggctggtgtccaactcctgggctcaagcagtccgcccacctctatctcccagtgtgctgggattacaggcgtgagccaccacactctgcctctgtggtatggggcagttcagatgatatcatgggtggacctgtgatgtaggcaaggtatgaaaaaagagagaagagacaaagaagtggaaatgtagtatgaggagagaaggagaggtagagagagaatggggaaaagagtggggcggaaaaagggcagttatggagcaatgctaataaccatgccgttggttgtttttttttaatcctgctttcagctcttaagctgaaataacctcttaatgccacagtgaagacatgtaaaacatgtaaaagttagtttaggctgaaatggaaatggaaatagatcgacccttaaggttttgctatttaatataccaccaccattaggatgtttacaagtatggaaaagagcatatcatactttaattgcaattgctgtttttttaaaaaaatggaatatccagtgagtgctatagcctagcatactctaatcataatagcagttgccttagtgccgtctttcctctgtgactcaactccctattgtgtttgtgtgtgtgtgtgtgtgtgtgtgtgtgtgtgtgtgtgtgtgtgtgtgtgttctatggaaggcattttgtttttatatatttagtaggaaaattttaaaaaccaaagagaaaccctatttataatacactctagtatcctcaaccttggttaaaaagcaaatgttaagtactaatacttaatccaaaagagataaataatggggccgataacagaaatctgtaatagcagtgtagcttgtctactgctgagcaagctttagacgactgcgtttaaaaggaaatagacccatatttgatgtttgtagaacagataggcatcctattaattgtgctgtaatgaagctagatcacattcttgggacataaataagagagtcatagagattttgttctaatacattttgttgggtagtgtactcttcttagtctatttaaaaaaaaaaaacttttacccctttgtctccgaaatgtctaataaatattgattagaaatagtggtaacatttcaaatattagttctaaacagtgatttttttttttttggtagagtttgagtgtacttcagaacatttctcaagttctatggaatcctaaatgctctgggcaataaaagattttttcaccacttatatttggaaaatgctttccaatataatggcctgtttgatgattataggtaatatttaatgagtgcttaaaatgcaccagatattgggctagctttcatgcataatttcctataatcctcacaagtgccctcataagatacattgtttttggatgtgcttttggattagttaaagctcttgcttaaggttacacagccaacaaaaggcatcatatactttgaggaatggtgttcaagagctccagtcattatcagtcctcttcaaaatttttcatttttttttgccctaaattagctacatccacattcatattatgtctggtgcatgctagaatccagctcgatccagtctgtttgagagcgtgagaagagagtttgtaatagcaaatgatgaggccccttcacctggggttgtgtttcttacttttcttgtctctcctaccagtaatcatttttcatgttcattatatatacaactctagctgcaggaagagttttatttgctctcatagagaagagcacttgagtcctaattacctgtatatccttccctttccttcccattaataagactaatcatgctctaatactactattataccaccagggtgaaggcagaacctccatgtttggcttttcttttgtccctgtacacatttgcaggtgaagactatgacacaattactttaaagggaatattgctcctttggaaatatttcaaagctgagacgacccacattttattaaatttgtaagccacagttagattttattatagccaggaaggccagacttatgcagaattttttcgcaagagatttcggcctgttctagagaagactgctaggtactaaattattttctgagttatcttgattttagtatttacaaagccatcactactcagactttccagccccactacccaatgatggaaggaaggagataacttcaatggactttttgttagggttacaaaggtgcccctctttgctgctggggggaagaatagaataagcctttctttgattttctcattattagggattcaggaagttcttgaaggggtgaatgaatggaagagaaatgtcttagtattacatttgtttcttcttcttcttagtattacatttgtatctcttgttcagaataaaatctttttctttggcatatcatcaaacggaagatgtttttagggaaagggatgacatactaaggcatttgctactactgggacctagaatgtaaatatctgatgaagcatcatacttttaagacactgcttctttattatcaagttttcttattttacaaaatgatcctatactagttgatgcaaggtgagctgtgacaaagcatccttttagcctttccttcctgggaagtgtttgtttcagccatgagtagttaaactagtgccacattcttttctttcttgttttttttttagtggacagtataagaggggtatggatagcagtagggtgtgggaggatgctaaaaattcattcaaagaaagtcaaatattgaacagatgagaaaacaaattcaacacctaagctcatgaaatgatttccttgtggtcaacagtgtgcagtgcagtcacttctaagtgttctcttttataaagacaggtctccagagtgagaggatgaatgccatctcctctttatggaaaaacttgtaaagcagaaggtttgtaggcatgtcatatatgccactttcactcttgaaaacaccaaggaaaataaaacacacttaaaaattaatttgtaactcttaaaacactgcaaactgtcctgcggaactttcctctgcagcccgggatgaactcaggcaagattccatacagaatgtttattcctaatagccatagtgactcagaactcatgtcattccaagatagtgtaagacacaggcgaggtggctttcaaacttttgactgtgactcacagcaagaaacattttggagtaagacccactgcatagatagtgcccacacacatctgaaatgaaaatttcatgaaacagtaattactcttactatgtttaatgtgcacctatttcttgtctttttaaattttattcagttttatttcacttgaaaagacagaaagaaaccttgtcttaaactactgagttgattttgctacccaatagtgggtcataccccatattgaaattaaaaaagacaacaccagtctgcttcaagggttcactgtgcaggtgttcctactgccctcatgtgacagctctgacacctgaccataggtcatctggtgtattcctcaacaaagctggtctagaaccttttattttttcacaactccatgtagcctgaccatcctttctctttaagtcagtgatttgggaggaagagggaagtttacatttgcaccttctcagcctgggtcataacactggagcagctgtggcctgattctcatcagctgaatctgagccctgcaagcagggtgtttcctagagccatggttaatgctacatctaattctttgttacgggctagaacagaacatggactttgctgagaatatgtatatgggatgtggggaggagagttgtgggaaggagagaaacaataaaaggaagaatgagaaattcctcttgggcacatgatggtgacattcaccttaaaaaaaaaaacctgccagtattttttaaattggtgatttgggggattggggtggggatgactccttcgttttatttcttgctgcatttgttttgtcttctgaattatggtacctacaccaaattagttttagttgaaaaacaacagcaaaacagattcattcagaaaagttacaaagaatgggtagaaaaaaaattaccaacagtccagtttagaatttgacttctctgatatatataatactgtagcatgccatgtagagttacagtaatgacttctttttatccttaacttcacgtcccagttcatatgcttcaaatttcagttttgcagagggttaggatcatgtttgacatagtattgatggtcagagtcaaagaatgtgttctgaaaggaaggctttggccatgcataggaatcaagcctttctcaggaaagagacaaggccaaaacaccaccgttagtcatcctctgtttcactatgtctttgcgtatattctccttcgcctctctgtgcttgttgccacctggtacgatggaaacaataacggtacccaccttgttgggaggagtcatgagactacatgccgagtgcccggcacacagtgagccctagagcgtgagaggccagaatgtggaggtattcattgttttatccctagtgtctaagacattacctggtgtgcagttggtgctcaataaatatttgacaaatgaataaataatgttggctagaataataattatggtattagagaaaagataataagagacagtgggactgatctgggctgatcacatgcactctttcaaataatttattatgagtttgggaaaagtgaatcagttataagacaaacttatgttcttttagtcaatttaaacaggagtaccagttgacaacactggtaggcattggtgacgtaaacataagcaagaagtggttcctgcttcaagaagtcatagtccagttggatacagcaaaggtcacagcatagcatgaggcgtatggacaggaaaggcctgcattccacatggagctgggtttggggctggtgatgcagggaagctaagttttgaaggataagtagccattagaccagccgaggagggactaagaaggacattgcaggcaggggaagggtgaagtccagagacgtgagatcatgagatcatgagcggtcaccatgtcatgagacggaattaaggttgagagttgagccctgcaggcatggcagagccttatgctaaggtgtttgtcttctatcctgaaggcaatggagaactgtggagagattaagtaggtgcagtttgtgttttgaaagagtggtgtgtggtgaaagtggatcatagagtgtggcaagatgagaagtaaagggatgggaaaaactaatcctcctgcagtttagggacaggcaggcacacatactccattttcaaaggcatcccaactgtagcaactaaatggtggcaaacaaaacaaaaacaaagccttagtgcgaacgtagaactgttacaggtggctcacaaatgatattaacagtgacaaaacaacaataatctaataataatgctattgctagttttattatgaaagcagaagccagagctgctgacttttctaacaacttttgcaggacatttaaatccctctagctggccctttgttcctgtgttgccatggagtgtcaataagcccagctcagaataacccaggcagtgaaatgagaggtacagcttgctcactggcatgttggctggccaggttacactgttttcattgctcccatcttgggaggagcactgggcagctggttgccctggcagctgtgaaggtgtatgtctcttggctgcccagagttcgaaacggaaccaaaacttgcctgcctactgagcatgtgcagctcctgactgagctgacagcaactgaaaaaagcccactgagcacctgtcccttgtacaccagcccctggccgactgccatttaggacaatgtggacttacttagtagacaggtgaggtgctgagcagattttaatggtctgaggaagatcttgggaactttggccctacttaaaaggaagaaaaaaaaagcagcaggcttctgagcagttccatttggtgcttctgtggttagtgggtggccacactggctacgtatgtacagtatgtgcctgaagacttcatattgttctccttacagcagttcagtaaactaagtaagttttctctttgagagaaaggctttcctaaaagtctcctagtggtagccatccatggtttatacagcctcagctttagaaagttttggagttaaactattttgtttcattttatacctgctctttaatccctagtgattgttagtcatttctacaaggtgtctctttgctagattattatttctcagtagtccaaatattggcacaagtacaatcacagaatagaatcccagcatgtcaggagctgtctgttcccttttgggatttcttccatttccttctggactttaatctcctcagtaagcttgccattgttggacagacttggtggccagtgtggatggaagcaggctctggaaggaaatgcttctgaaatgactggtggcattaaagctactatttaaaagtgaccctttgtagatacttgggttatctttaggctgtcagtgatctgcagctacaggagccagagggaatctgcggaaactcttgtttgttgctctcgcctggatttgtgtttagatattcttgctccccagccagtggcctcgtgacacatctcagatttagctggctttcttctgccaaagtccaagattattgtggaaactgggaatggtttgccatggcacagattgaaggggagggattgtgtgtttgaaaagccagttcagcttcacagcactcaaatgagatgctttctgtttctacctggagtgtaggcacctggagcctttctgtgggcccaggggtaaaaaaggacaagctcaaaatgactcaaatttaactgtctcattgtgactgtaagatctttattctgtgactgataagccaatcttgttcaatatgttaaacctgagaattaatgaattgttttggactatattaattagactgataggggaaagaagatatgtaaagcaaagatcaagttataaaggctgggatacagaggcacaggcacatcttcctggggttgaagacatgggattcctttcttcattaacctttcatggagttctggacttggtagggccttgggaaatgaatggggaaattggaggatagggaagtagcattatcagaggcttggactctgccccaagtttttacccttttgactgttattttaaaatcgctttggcttcatctaggatggaaagtaaatacagtaaccccctatttatccatggggaatacattccaagacccccggtggatgcctgaaaccacagatagtattgaaccttatctatactacatcttttcctatgtctaggataaagtttaatttataaattaggcacaggaagagattaacaacaatagcaaagtaaaatagaacaattataacaataggctggcatcaccactcttgtgctttggggcagttattaagtaaaggaagggttccttgaacgcacctgcaataccatggcagtggatctggtaaccaagacatctgctcagtgactagcaggatggtagcatctacagtgtgggtacgctggacaaatggatgattcatgtcctgggcaggatggagctggacaacgtgagattccatcatgctactcaaacagcatataacttagaacttaggaaatgttcatttctggaattttttgcttaatatttttggactgtggttgatggtaggtaaccgaaatagtggaaagtgaaacggtgcataaggggggataagtggggactactgtagtctggaagttactttgttcactctgtgcttttctgtggggcaggataggttgtggagctagggaaggggagtttaactaagtcaggacattttcacctttagctgtgggtgtcacagtgcctaaaggctgcatttcaagacttgttaaacaaattggagccctgcttaacttttgaagggtttgtctctgtagtttgaaagcttccagaaaggctgtaggggtgtggtggaggctcgctgatggtaaccacagctaagattggcaaccttggaggaggcccagtccatgaatcccagagagagaggtagagtaggaggcaagaagagaaattgaagtggagagctaagcacaaaagccacctgctggctttttctccactgttctatctcatctagagcccattgttaaatgtttcctgtaaaaccaaaattctcagtgtagagcccaggtaggaaacccttactgaaatgccatacactctctggttagcccgaggaggtgggggaaacaacgaaaagtgattcctcagaatcaaccattcttcctgtggcgcgaacagagcttccagcctgagacattcaatcgatggaaccacattcctggctctctcctaagactaaacaaggaatgacttctgaagtgtttacaattcactgggactttcttccctgttcctccagattattctactctctgttactctccctataactagagctccacttagacatggccattggcacatacgctgaggagacagtattttttggtttttaaagtattcctcagtaggcagttcccggtaggccttgtaatcctttgtttctccaaagcagagattcaagaagtttgaagacagaatgaagaaaggggtcattattttctcccgtattaaggagttaaaacaactccttaatatgctgtatttgttaaagccaagtctttgcaacattcagagaatcataaaaggcatggaaaagacagacgaatatcgtcttaggtcattacctcacagtgttctttaatttgttagtcacttgaaaacaggctgagttttttggcttctaaatagaaggtgtggctgctgcaataggcttaatttacagggattatttcagagacaaggagtcagcccagacacaaaataaacagatggcacttttttttttttctcagcttcagcagttcaagtgcaggatgacttaggaatccttatcaccttcagcagagcaagaaggggaagatgatgtaattctctcttccccactccctattgaaggtgccattatttcaccgatagggataaaatatggcagcaaagaccagggaaaaaatgacagcaaggagcaggggcagctttttctctactaggcagccaagtcctgcactgacccctccaagctgacgagttgcaggtatgtgttgtgttttgatgattctaatcaccatagcccagagtcctcaaatcaaccatccagagaaggaccacccacagagcccagctgttctattaatgtattaaatagttcctcatttttttaaggaacacttgtattttacctgttcttttaacaaattaacaagcaaacaataaacctaccacaccacaaaatattaatcttctatattcgtgagcccaagtaggtgaacagatgtgatggtatggcaagctcttctaggaagaaatggtttgctcaggcatgccggcttggtgactaagccctgccttaagatctgtgctgacatttaaagactttatgggctcagcctgctctgaaaaccagcatcaggtctctttccacctctaaatcctttctgtgaagggaaaattcattctgaagcaaatattcgtcaggcttgcactcctgccaaccactgacgctgttgtggggtatgtaatgaacggtgagcaaagtattaatagatgcaactcaccctcatggtgcttacaatctataggaaaggtgacattcaacagccatgcagacacaagtatggctgtagctaaaggggggttcctactttaaatctgggtgtgtgaacaaaggcttctctgaggaagtaacatgtaaggtgaaatctgcacagtagaaaggcactgactaggtggagaggtgttgactggagggagataagcattcaaagtggaaggaattccatacttaaaaggacctgagatccctaagcaggaagaagaggtcttttaagaacttccagtaactgaagaggaaactgaagagcatgcaaggatcaggtcagccagcagttgtaggccaggttaatgactggtctctactttgagtgtgatggaagcccgagagagtcaggcttgtgtatctgaatgaatgggaatgccatttcctgaggcagggaacattggcggaagaatacatctggagttcaaaatcatggaagtttttgttgttgatattcaatttatatgcaatcttctttgaatgcctctatttgcccccataactgctgaaatacattttcttcttggctttacaacaactaggtgtcagtctctcggataaggaaaaaaaatgatttgagttccctaaatgagtgttttataatgagagattatttaggcactgggtgtattttatccctgaatgtatagcctgtcctcttgtcagaggatcaaatgcccctcactaggcattccagacggacctttgtgtctctgtcttaggagctggcttgctggcagtgatacctagcattgcaaaatccttcttaaagcctttgtttaatgccagagatctcaaatgctttcaattctggagaggtgccaaactgtgctcccggattaggagacgatggaaggactcctataatctataaacctcatataagcttgccatttcaaatgaatgaattgtttagagtgttggaaggagtccagggatacttgagttccttttttagctatacaaattttgagctattggacttttataattacagtctaatttctgcattatgatttgtactactttgaggtgaacttgtaaaaaattcagcctgttccttttgctgccctctaggacaaatcatggccatgggccggtttgtttacttgtagcattttcttatttgtcttttatgtcaaagacattagtgggaaatgttggtttttgtgcaccatttagagtaatactcagtttcaatgccttaaagcattgcagagtgcatgactgggcaggcgtgaataggtaagtccacagtgttgtgattgctaaagtcccacttaaacataaatgtgaatacttttaccatgaagtacaagattataccaaattgtggacagtttttaaaagtccacgatgttctttggtctgcctctctctctgctagtccggcattagactcggaggaggtgtgcccaggtggtgaactgaggatcatacagagcaggaaaaatctttttaaagagctggccatggtgaactcctgggattcccagcctgcaccgctggtttgtggagccagccccgtattctccctggcggttccgaagcagtccctgtttgtggtcagaactccctgctgttcccagccagcccaggctgcgagtgttttcacacggctctggctctggtgatacaaagggcacgcagtgccagccataacactgagtaatgccgggaggtgccttctagaacaaacaatgtgggtgagctctgcagagagggaatacctctggcttgacatttaaattactgaattattcaaatgaatgtcaattaggtggagtagactttctgccttctgccagggcacttcctggatattcgcacaggcaagtgtaaaatactttacatcagatacggtgcttcctgtcagtactgttgaaaatcagtcacagaatctgattatctgttccttggtgttccttgatgtgtactgtatttatatcacagcctgaaagattaggagtccacacacccatacctgtggccctgaaaggggttttgtgatcattctcgaaccccacccccactcccacaccaaataaaatatcacaggcccacacatgttatgcttattcctaaatttgacaagactgaaaaagtgagtcatggacatttggagtcccgctgtcttccttagaattgtggatattaagatccgagaatgctattactaccttgctttaaaccttctttgttgacttcataattctagttcagaaaatacttccatctactccactctgtcagatgaaattgccaaggtggcacgtagcgaatgtgagtgtgtgcatgcatgtgtgtgcacctgtgtggtcatcctgtcattcttatgaatttagggtcttcatttatatttgggtatatataaaaaataaatacatgatgaaggactttgctaattagttatatgggaatatacaaagtaagaagattgaacagtggatgaggaacagaataggaaagagaagttagtgaaggttttgtacttccctgttagctgttagactcagctcagggttctttcatatcagagattgagttaattattacgtatcattaacagttgtctttccttgcctttttccccagttgtggagggtaggttatgaaaaccctggtatttcacatcttactgaaaagaatcaccaacttacaggcagttaatccctggttgtccacatacaactacaggaagtatataaagaatttaaggagagtgcttaataaacagatgaatctctttgatttagtttgtgaccctgcaggattaaagcctaggtacaccacagagttaggtataatgagttaaattttactgaaggtgatatttacttgaggctgtcacgtctggcaaactctttaggttatagtccaaacgtctgccaggctccctgcacagcctgtcaaaaactagagaccttggaaaagcagtgccccttcctgcatctgtgtacttagaatttagtttgggatggaactttaaaaacagtttattttgagagcacattagagaaatgattgttgttgttactttatttttttaaaatttggcatttttaaattacaagcatgggtgtccttaatcctttggttccctggactgtccgtttaggaccatttaggaccaatgatgagcaggctctcttctagtctagcgttgctggtttattgttattcttagcagcccatacgttcagcgagctgagtaaatcatactcgtcaattcattgtcagtccatgaacagctctctcctactttatttttattttgctccttcatcccagtgctaaccccttatccccaaaccagtgtcaacaggcacatactcttcaatgggttaggtatatatcctggggtatctatgatcttttaaaagtactcgggatgttaaaatacatgtttgtgtttcaaatttacataaattgcattatttcaggtttaagcatagtcttttcaattctctgccatagatcacaagcaaattagtctgacaccatgaactctccccctcactccacccatccacttccctccaaagaatcatcacctgttgggcagcatagttggcagccctcagcctgctttgtgccattcaagagtggcaagcatgtctagactccctggaaatattatccttcagctctcttttggcaagtgtaaactttttgctggattatgtcaacagatatacatgtttctcatcctcatagaaatagattggtgctggaatttccttcggatttctccaggcaaggaacataaagactatctctttgctcattaaaacttttgctcattaagaatgtttgagggctcttgattctcaggggtgagactggtgacatacatagactgtcagcggctattttggattttctgctttcaggcatgtctttgctcttggatgagccccttgtggttttcaaaggaactagcaagtcaattataaatagaaggctgtgtctgtgtgtctgcatgcacttactctgtgggacgaggcacccacattacagtgggcagtgaactatttttccacttctttgaagagggaagaagaaagattaagaatgcttttctctttttgagataacccacatctctacacacacccacacaaatctgtgtaaatgaacttgacattttcaaagaccttaccttaaggtctcctctggaaagcacagccacccaacctgttattttaagaaagaagcatttatctcctagacccactactgagggttcagggattagaaggcagcctctatgtgccatagacctttggagggagctctgaaagctgaatttcctaatatgaacagtgcttcggcaaaagtggcctcagctaactaatcagtggcctctaggacttggctgtttacattttatcctctgtttccttccccactagtagaaactgtgggaccagcaagtctaaactaatcatactgacaagggaagagaaaagagtaatgtgaaaatgcagatgcaaataagtattctcagaaagagacaattaagcagagtgattagatgtgcttccctgatcatccgtttctgcctctttccattgcaccttgaactccctaggtgtgtattcttccagtggtcccacctgtcaccttactgttcaaacattattcggttctcttggtctccttgtgccctcattctccatatttggcaccatttttttcctgccagccaaaaattcttaagcaggtgttaattcccactataatctatgtaaactttagtgttaccactagtgaaaaagttagtctaggcatctagctggaaatattggtaccatggattgtaattatagattgtacagccttgcaaactcttattatattacaggttgaacatctcaaatcccaaaacctgatacttgaactgctctggaatccaaaccttttttagcattgacccaatgctcaatagaaatgctcattggagcattttgaattctggatttttggatttgagatgctcagccaggataaatacaactattccccaatccagaaaaatttttaaatttgaaacttttctggtctcaaacatttcgagtaagggatactcagtttgtagtatatttctgccatgtacctgcaagaatgtcagcattccttgttttacgagttgatggggatttgtacagagctagcaaaaattagtattaatagctgccatatatttaggagctttttttttggaatagaataaaggtgataaacattatgttccagtaaaacattttattttgatgcagtaattgggatcttagagccaatcacgctgaaggttatatgaacaccacagggggagaagctcattttcagaagtctgtggacagatgatagccagtctttgtcctaatatgatctaaaagggtgcacagcttatataaatgaatcgctatgttgagaggcaattattatttgttggttggttaggtgacaaggtgacagaatgtggacctcatggttgatggtgatgcttagcttgactttctgttgatagaggtgtttggaatggtcattccctcaatgaaggtgaaactcatacggtaattcctcttttttttttttttccccttcctttctctcctttgcagatgagaagcccaaggtcaaccccaaactctacatgtgtgtgtgtgaaggtctctcctgcggtaatgaggaccactgtgaaggccagcagtgcttttcctcactgagcatcaacgatggcttccacgtctaccagaaaggctgcttccaggtttatgagcagggaaagatgacctgtaagaccccgccgtcccctggccaagccgtggagtgctgccaaggggactggtgtaacaggaacatcacggcccagctgcccactaaaggttcccatggacttttctatttctagatcaaggggttttgttagtgttgtcctgggtccgtgtgggttaaagatctaagtagctatgaggcattccacctacattttgaatcagaggcgaagagctacaaggaaggtcaccctgggtgaagaagagaaaggaacagccttttggcatctaaaagaaggatgggcattttggggaatgtaagcaaggtgatgtccatcttggggacagcttagctgaccagttagctttctcttggttgctgtgactcaggtgaacagctcccaatacctttttatgttactgacccatgatgtcattcataatttctgaaacaattctgctagtaaatactcatctctgtgtcaagtgtgtagggaggaaaacagaacggactggtgactgagtggaatgcctttcctgttttatgaggaaggagataaaagaaggctcactgacctcttctcccatatctgatgcccagtgaccctatcactgaaatttgaagcaggatgagatttcgcacaaaccctgtagtttttgtggaatcttctctctaccatcagtacagattgcatatgctaaggaaaccagtccagctctgaaactgtttccctattaaatgagccctaaattgcaatcttaaagtctctgcaaacatttatgtaaactcattccaagccaaatttattctcttaccatatagtacatttttaataggtttagttatttaattttgcactcagaaaaaagaaacaaaccaaaaagtggaggagaggtaacgacgagcatccaaaactagaaatgtcagccagcaagaaaggaggcagaagaacaaaaaagctgatgcaagatcatgttctagtaattttgaagttatggtgatgactttaaggcatatggaaaaggttaaattctgacaagcaaataggattgaataatcaaagagggttttaaaggagatcaagtatttacatggttaaaactaaaagggtccttgatggaataaaatttactgttatactttgtgagttaaatttttattaattgggtggatggacataaacaaatgtctgaattcatacaaacattattataccaactgtgaagtttctaatctgcagatcactctgctagaccttgagttttaatagaagatttttttttttgaatttaaggacattctaatctgattagcgtggccacagtatttataattcagcgttgcattttgttagttttacactttctcatgcaaatgacatatgccatggagtatgatgtatgccaagctgttgattagttgggcttggaaagttaaacaaatacgtaaaggaagttaagcttgtgattggatggctgaagagaccagtaatatggaaatgggtaaggcctctgtagggaagaacagggcctgatgacataatgtcatggagaggtctgaacccagggagtgaatcagtgaatgaatgtctgaataagcgagtaaatgaagagaggaatgaatgggttcctaggcagaaattgtgatgtaaaaaaatcagtgagaaaccagcagtagacacccaggatatattaaagacagagaccacagatgggtaatttggttttagctcaggtagccctttctcttaaggatagtacagtgtctgtaagggcttgatggcgaaacataccaaatccaagttaatgagagtaatatcaaagatttgtacagtactttatattttaaaagcactctcacattcatacattaatgcaattgattctcagtggaattttttcaaattctagttgtgtctaattgaatgatggttaaaatgtctgggccattggccaggcattaggaagtgttttagttttaatacttcgtgagttgtgagactgtgtggtcaggatcaggagctacttgttaggatattggttatgctaataataagtaagcagtgatccttacaactaattcccccttttccctccaactccaggaaaatccttccctggaacacagaatttccacttggaggttggcctcattattctctctgtagtgttcgcagtatgtcttttagcctgcctgctgggagttgctctccgaaaatttaaaaggcgcaaccaagaacgcctcaatccccgagacgtggagtatggcactatcgaagggctcatcaccaccaatgttggagacagcactttagcagtaagtcatgaccccacaggaaatcccaagcataaggaaggtgtctggagacacgttcttatttcgagcatgaaacgctaaccagtaatgagtgactgaacagtgtacacacatgctgttggttacttatgtcctaaacaagcacatgctggcacctgtgtagtcttcccatatcagaacagccattttagatagacatttaaataagggatgggatttattttagtagtgttggtagttagttacttttctctgaggggtaaagcaaaagagacagagaatggttgcctacagttttggagggttggaatttgtggtcttcagttactctatttttagccataaaagtgctcctttaaaaaggcaccttttgctgaatattaaatattaatttcctttctagattatttcagcatcctgtaatttaaggcttaaaaacttgacatccaaaaaagcagcttttaaattttgtatgctcctgtggtgccctcttgtggagtgcagtcatttggttaaaccggtgttgtccaatagaaacatgtgcatcacatgtaatttaaaattttcaagtagccaccttaaaaacaaacacatgaaaaaacccaaaaagtttcgtaaaagtagatttaattttaacagatattcaaccaaatacataccatctttgtcatttcaacgtataatcgattaaaaaattattaatgtaaattttacattctttttgcttttgaagtaaattttcaaaatcttgtgtgtattttacacctatagcatatatcaattcacaccagccacagtttacttgctcatggcaatgtgtggctagtgattaacccgctggactgcacagtgttagaaactattgtatttatacattaaaaaattattcttttgcatatttttaaatgataaaatcacattaaaaaatgactatctccttctatttaccttttaaaattgcttaccaagtgttcattttaaagacgctttgaactttaagtggggaaagggtatcacttgctctaaatagaaggttatcataaagtgcaaaagaaaaaataataacattctgcatggatattatgctgagtctgatgcctactctgaaaaatttgagatttgtgggtgttaagtgagtgcaagagacatgccaataccaatttgagactccttgtcacaatccgattaattgaaagacaatcaaagtaataactttctaatgtgattcagttttacttaatgccattgcccatgtgtatttgaaatcattttgcagtaagtcttgttctgctagacagcaagcttcaaagtgtctgatagttctgcagttacacttgccctgcagctccccttatgctggagaagacttcccctcaccagtgaccatctgggtagcacagatgctacacctggacaattgcaggacccacctgtggcaggttgtcacagacatttggtagtgcctgatatgggctgggaaacatcccattctactgcctgccccatccatcactgggccactttttggtatgtaaaagggggaagtaaccttctgtagcttccatttacctactgtttaaactgtggtacagtggaactggggaaagagaatgcagtataaggacatttcatttcaaaaagtagagaaatacaattttttttgttagatatatacttagaagtctatttcaagctttaaggaaaattaaatgagtttattgagttagtagcaagaagatgtgaggatgaatcctgacaaagctttagcaaagcaagattctaaaataggttagttagaacttcattcctcagagctgctaacataactaattaccaagggcaataataggaatatctggtataaattactgtttaaatggcttttagaattttgagagaggaatggagcatatgccaaaatagtcctttaaactcaaccatgtcatgtgacagtgtatcatgatataataacacagtaaagaacactatttaaaacaagttgtcattattggtctacatacttgcttatttaagcaatatgctcatttgtatgtttcaacaaagcatgcccttactaaacagcacgtctacattgaaaaacaagccttggccatgcatggtggctcatgcctgcagtcccagcactttgggagcccaagggggaagatcacttgagaccaggggttagagaccagcctgggcaatatagtgaaactctgtcttgaactaaagaaaagaaaagaacaaaaagaaggcttggcatctgagagttgggatatacgtttgttagtcttgggttgattttttatttttctttccttaggtctgtgaacagggtttagaagcaggatcatacattatggaaaaaataacacattagtttaattttcagaattattcttctcgaaaaagaatgaatgaataaggagcaaaaagaaccgcaagagagaaaatggttagggagatatgaaactctgcttcatctacactcattttcttgttgattatcccttttgtggtttttaagggttctaaatttcttccgttggatgctcagcttttggtaattttgccgatcaacagtacttcacagtggtgctcagaagaagtgaaagaagatgaaattcacacaaatcaatgtattgctttagtaggccagccaaaatgtttgggaaaggatgagctttggggaatattaagtcaatattactgcaactctacctttatcacccatcggcacaatattgtttattacagataatctatgcctgatacctgcttcttggcttatgctgagagtaagaaggaaaaccttatcaatgaactaactgggaatctttttgccaacaccttcatttgtagacattgacttggggcactggttttatgttttcaatgaaagctttatttgttttcttttctgatttgtgagtgattcacattaagaaatgataagtaggtgttgatatagttttgctcctcacctgcctaaaaggaaacctccatccaggcagcccgttgctgcctgcgcttaccaatttaatgatccacatggtcattggagtcttttcgttacaaatcacattagagttgtttgttccttattcctagtttgtttgttcctaattagagttccttagttggtatggcaactaaagtgaatcatttgacagatacttagtgagaatagcaaaatatgtaaattatacccagttcttgaagttgaaaggaccccccccacccttttctgttccacctgctattctctctactgctttccttgagatcatatctgcttcttgggctttctgatttacaccttcaactttgtctgctcagcttctttcattatatattttatttggaaactctgtgtataagaaaggactacttatccttcgggaaaacctatcatatattaggtgaagtgctagcttctagtattccgaagaaataaaacttttcctggccaggcgtggtggctcatgcctgtaatcccagtgctttgggaggccaaggcaggcagatcacctgaggtcaggagtttgagaccagcctgaccaacatggagaaaccccgtctctactaaaaatacaaaattagccgggcgtggtggcgcgtgcctgtaaccccagctacttgggaggctgaggcaggagaatcacttgaacccgggaggtggaggttgcagtgaacccagattgcgccattgaactgcagcctgggcaacaagagtgaaactccgtctcaaaaaaaataaaaaatacaaaacaataaaaccagtccttcttccttcttccagaggagctttacatgtacactaacaggccacgtgtcccggattgctgcccttcatgtgagttacaatgtcatgcatgctaatactccaaagtgggagctatattgctcaatcgtttcttttcccccttgtcttaaaccacaggatttattggatcattcgtgtacatcaggaagtggctctggtcttccttttctggtacaaagaacagtggctcgccagattacactgttggagtgtgtcggtaattcttttttttcctttctttgtgggtaatatgcaatgttagttttgtttttgaagtaaaagatggaacttggaaaatctgctttttgttacctgttgtttccttattaaacttatgagatgtggtctctattctgtatgactaatgttggagcacctgaacttgtttaagctcttatcaaaggagtccatcactaatgagtacagagaatgcagagtcaaaagctttcagttgtaagtggaccctttgggatgatgagagaatgcccaaaaaatgaattgatatggttgctccttaccataggtattggatactctgaagtaagtaggcttttggacaatgaacttctttattgcaattctttaattcctctcattcttttcttctttttaatggcaataattaatgaacataattaatgaaaccaattctagcaaagggatctttataactcctttatttaaatatgagctatatacatttctccatggcctctcacattttcccaatacatgaacatatttgtatgtagacataatcatgttgtatatataatttatgtcccttttttcagttttaagctcataaacatttcatgtgtttgtacacatcacaaatatttttgaagattatgtagcagtccgtggaatgatagtgtaactataaccatactgcttgaaaaagattttgcacacattgcttctttcttttgagttctcagaaaaaattcccaggaactgggggttcctgggtcaaaatttgtaaatgttttttacagcttgttttatatgctgctgattggctctcttggaagatggtacaaagtgcctatttcctgatttttgttagctttacttttatgtggtaggtatttgcaagttccataatcattttcctaagtttctcttttagacggcttgcagggatggctgcagtagcaataatgggttggcaacctctccacaccctcctcctagtgctcatggtttccgagggctggattttgcagctcctgccgttgcatcttttgcttttgggaggtgacctataagctgcccccaccacttggctgctgttctccagattttcttcttgttttcatggaaagagggacacccccagtctgagtagtagaaacggggaagggcagaggtaggaagagcagtggctgctgccccaaggcacaggagtaaccagcgggagcttggttgtcctttctctaggtctacggctattgtcactgtttgctgcttctcgcttctcctccacggcagattgtgaatggagaaaataaagatggaaaagccccaaatgtgctcattaatttcaaccagagttgtcctcttgtactaactagtatcttatttgattatgaacaagattatctggatagtggtgggaagacattgaaggggtacatttccctgtctcatctcccctctccactactattccatgcaagctatctcaagattagtcttcagagattggctccagagtccaaatggcaaaatagtaatgcacctttaaagtatgtagtttctggttctatagatattcctcagcattcttttgaaacagtataaatatcattattgcattttcttgggttaggactaaagactttaataaaagcagtgcctttcattagcttgtagttagtgtgttcatgtggtacagcttttagtaaaaatatatgtgatgaactgcatggatggtatgttatttttggttcaaaaacatgggaagttgggttaggggagtcatttctggatgacgatcagtgaaactacaaatttcaggtgccttaagggagcctttttgtggggctccatggccagggcttttgggcagctctgcttttgttttaggggcttctgcataatgatgaatttgcaaaaagcatttaacaacttaaaagcatttgaaaaccattgaacaatatttctattttaatttacctacctcgacattcatcttctgttttctttaaaacaacaaccaaaaaaaggatttgaggtaattttgtatccataattccctgggatattttgctctcatccctaatgacaaaatgaggacaaagggaaaataaagatacaaaacagaaccaaaggcaggaaaagattagcataccattttctggcagccagtatttgtagtatcttagcactaggcctcatcttgagctataaatgctggcaaattgctatggctttattaaaaggaatcgtgtactaaattatatttgtgtgacccaacagtggcccacaatgagcacttgttagccacattgaacatccttttgggttagttgttggtatttaatagggacatgatattcttgtcaggtaatctagatttagtggttgtgattatgattcaggtgtgtctcctggacagaactgcttctctctccatgtttgggttttcagtgacttagtgttccagcaaagaactgtattcctgtatatgcaggtggtgctgcagctgcttattagaagctgtgtgattccagcagtcacttgcctgggtagaaagccccactgccctgcaagttatatctcttgccttgttatctaggctgattataccccttgttgatcctcatagtcttgtggtaattacctcctcctccaacctccctgatcacccctacctataattaaagagaagaatggaagagggagcatgtagttgacaagctgacaagtgtgttgctgctgcaagagggggccatgcaccaaacagattagatcacaagtagagttgccacgttttccaaaatgtattctccaagtagccttttcagtgtagcccacttgtagcatcacaggagctgtctgacaaacaaatacccatgaccagtatcagaagaagtcagaactcttctgggattatgtatttaagactttgcaaatcctctttttgaaatacatcttccgccaagaaatctttatggatgcagtggctgcatgtcgatcttctagcagcattgtgttttggtttgtttttgttttttaatccttagaacacacattttaaacttaattgttctcctttgtggaaaaaatgcatatctaaattcaccaatttggacagtgcctatgttgatcctgtgtgaagggaaggaaccaaggaaggaattcagtttactgatgtacacttttttggctttcagaacacaattgaaatttaataatctgtaccatttcctaagttttactttcatgtgttttaaaagtcatatgcattttatacctttcaacagaggaatttaaatgtaaactgagtaattagcagctaattatacaatgcagatacagaaggcagtttgttatcacaatatggtagatgagaggggcagcttccaccttatttttgtatgtctttataggccaaaaaaaataaaaaataaaggttgtgatatttatattcccaagctgagtttctccagtaagcaatggagggattaagagttgcatgcactaaattaattattcttaatgatgggctggctgcctccaaaatgactactgttctgtgtcacctatgttttgcttttcatagggaaaggcaggtatggtgaggtgtggaggggcagctggcaaggggagaatgttgccgtgaagatcttctcctcccgtgatgagaagtcatggttcagggaaacggaattgtacaacactgtgatgctgaggcatgaaaatatcttaggtaagtacaaggataaccccctcattaattgtatctagggagaaacaattgtctgcctttgctctctccgttttggtgaatgtgaattcgagagtgtctcctaaaaagcaatatagggatccttagcatttatatgctgtttaattttctcaaacaccagtttcttatttaaatctgcaaataagtttaagactctctggatgatgaaaaggaaatccactagtgctaattcttattcctacatctgcagatcgttatttaaataacaaaaatttgccccatattgttcacttcaaggctcattggttgttctactcaccccaccctttttgaatatttattacttgaatcaaactaagaaagatctttggactatttcctagagattcacagctcccagggatatcgtaattaaatgcacattccctcaaactaggcatcatttttaaaacccagatttgcagagggattcaggatacattttaatttagaaactaaagcttagcaacatttgtgaaatatgtaaagtgcccgttgaaatactgctatggcagtataaagggtgagcacactccttaggcccattgacttctgtatttttgaaaagtttctctaagtgtgtttatactgatacatgtatggtgaatgctgcctggagtgcttcttcaatagtggatataaagtttatatagaatttaactctgtataggatagtgttggccaccttatggctattggattaggtctggctcataggaaggccattgccaaaatttatttctattttagcactgccaatttagtatttaaatgagtcaagttgtctgcaaataatgatttgacagttgtccaaagcttcaaagctttgcttccgtggtgtggtggtgatgttccatctcaaaattttttcagtttctgtagttgatttctcacttttgcttacccatcgggtcctagtcatcacttaatcctcctcacctcagctgtcagctttccctttccaattcatctctccacttggagttgtcttccactggggagcagagatcattctgttcagtgtctttgatggctcccaaatttcctgcaacacttgtgactggtattcaagactccctggtttggggctcccaggaatcacttaaccatcctttacaagtatgccccattcagttactactaatactgaccattccttgagatcgccacaaacatttaggtctcactgtcctttctcaggttgctcttgatcactcactatccttttcacatcctccaaccattccttcctccgtcaaaacctcttggccccttttagttttgcccagtggaattaattgtgcttttctgcattccccgactttgtacctctgctctaactcttaccacacactgccttgtgttgcagttaaacgtctctgtgtaacaagaatagcaacagtagtaacaataaacatgcaatggatcattactacgcggtaaccacaggtgcattatgtgcattttgttacagaatcttcaccatgaccataagagaataggtactctcattttcccagttttaaatgttgaggtaaccaatatacagagaggttaaatagtggaggtggaaattacatcaggcagcctaactcttaaccacagttttgtactcaaaacacaaacattctataaaagtactctagaatcatgaagcaaaggtagttatataattcacgcttaagagataaacagttaaaaagaaaaccctgcttatttaaaagtaatttttttcctgatggtctagagcataattaatgggacagataaacttcttccctaagacctaaggggcttagtgaaggtgagataataaaaatgtattcgtttattatttatttatttaatcagaagctcctttttcttgggagaggaaatcagtagaggctacacagatatataacagtaatttaatttcttttgagtggtgctgttagagtttggggtattttttaagaaaatcattaaagattagtattatttggttcaaactgttaaagcagaaacattttctttattaagaataactaatgtccaagaacacattttgatgcatattgtggccagctaagggctccaagagaagcagcatcgaggggaaaagcagactggggagcagggaaggagtgggagactcagggctggccatgggaataggcttagaggaagagagagaaagaagtagagggtgaaggtgctaaaatattattcagtttgctttgcatatgtcccataggtgaaaatgtgaaattattttttctctgagtagaaatcagtttgtttggggacagtatggcatagtcagtaagagtctgggttctagaatcagacctacaggaacctaatatcaattatgcgatctacttacttcatgtggtttttggaggattgcatataaagttccaggcatgtagtactcaataattattagctgcctctgttgtggttgccgatgatgatgatgatcaaataggggacctttcttggctcacagagccttcctatgcaaggtatcaggacagctagcactaaattcagagttgatagcaacttaaatagctgtgtgatccttggcatctcccagcaccaactttattatctgtaaaatgagcataatgatgtctttcttaccagcttgttgggaaaaatctcatgagaaaatatatgtgaaagtgacataaattttatataaagtactatgcaagtataaagcattttaatgtattttctcttacattttcataagtcatttaattcttcctcaagccatatccgtcttaaaaaattttttttctcacctctttttaagtcccaaacttcactgtctaccagcgtggttcatatatgtgagaataatcctagaaaggcacctctgtagcagaaaaggcaagcacacgtcacaatttatttcataagataggaagtgcccctaacttccagacagtcttctgcatgctcaaaagttccctccagatgtctagaaaaatctcttccgggctgatcgcgatgtctcacgcttgtaatcccagcactttgggaggccaaggcaggtggatcacctgaaggtcaggagtttgagaccagcgtggccaacgtggggaaacctcatctctacttaaaatataaaaaattagcccggcgtgatggtgggcccctgtaatcccagctactcgggaggctgaggcaggagaatcacttgaacccaggaggcggtggttgcagtgaaccgagatcgcgccattgcactccagcctgggcaacaagagggaaacttcgtctcaaaaaaaaagaaaaagaaaaagaaaaatcttctccaacctcttcatccacatttgtcagtcactcactttacttcaagaccagttgagttgccacttcctaatggaagcctattgtaacacctagtctgaattactataatttcctgctctgggctcatgttgccctttgaagatatatattatagtacttttcgtattttattgtagtgttttcgtttttacatctgtcttctttagccagcaaacactatcatcttggtttttctgtgtgtgactgacagatagcatcataaatactcatatatttggttggtttctttttttatttcgtgaatcagtcaatcatttaatgtaaacttgccccctttattttacatctgagcagatataggctaaggagcctaactgagttgcccagtattagacaagtaaatcacaggcagagtcaggactagaatacagtactcaggttttagatttgatgttcttttaggatggttgatgaatggtctgttcctaaaatatcaacatgctgaagggcttggcactatcattatgggtgagcacaaagatattattgctatctgaaacttaaggaatgtaaaatatcttttaaagtattacttataatgaaatgaatatgaaattttcctattagcagtgcccttttaaggaataaatgctattatttttctctgttgatgcttctgtaaacctcctcttagggcaattggtcagtttaattactttttgttacagatgacatttactgtgtaggtcgctatttctaaatactttaagttataatgtggaatcctcatgtatattaatttttttcttgctctctccaggtttcattgcttcagacatgacatcaagacactccagtacccagctgtggttaattacacattatcatgaaatgggatcgttgtacgactatcttcagcttactactctggatacagttagctgccttcgaatagtgctgtccatagctagtggtcttgcacatttgcacatagagatatttgggacccaagggaaaccagccattgcccatcgagatttaaagagcaaaaatattctggttaagaagaatggacagtgttgcatagcagatttgggtaaatttctaaaaatatttttttcctcaccagttttatttttgtttcaatggttaggtgagttgcatctctcccccacaacatgttatgcaaaatttcaaacatgcagaaaagttgaacatttacaatgaacacctttatacccaccacatagattctcacattaacattttactatccttaagcattattatgtatttattcatctattcatctccccatccatcagtccatatcaacctttgatagagttgaaagtaaattgcagacaaaggaattctttcttctgatgatttcagcatgtacactagtatatcattgacaagaatgcattatttgctttttctttttttcaggtaaaatttatatactgtgagatatacaaatcttaagagttttgacaaatgttgtaaaacccaaatccctgtcgagatacagagtttcccattactcttgacagttacctcaggctcattcagtcagtccctgccacaccccacctcagaagtaaccagtactgttgcattttggtttcactaaccttcacataaagtaggtgcacaataaatactctatagaattagtttatcttaaaagtggtctctaaaatcattctgtaaccaaggcaaaagaatcaagttaagaaataggaaaataatccccgaactgattcactcttttccctgttaggatagctcattcttatggtgttagagtagtactcagtgtagctttagttgcattataaataagagtattttcatttatagtggcattttatataaaaccatgttcttcctggattcctagaatattggctaaataattgtgctaatgagaattcagggccctctacttgattaaacatggtttatatgatatttatattattgcaattattgttagcctgataaaggtttagacaaaaatagctttagttatgtaaataacaaagtttatttttgtttgtttttaaacataagggatttgacatgttaggaaaatttatttcctttgaatccctttaaagtctttgcttttacattgagaaattacaatgtttcccaagtaggagacgaaagattttaggataagcattgaaagagcatggccctaaagttttttgcaggcatttttagttgtggtgtagaggacttttatggcttattccatggctcttagagccagggcgatttgggtttaaattctggctttctcaattaccctgtatttttgtgcaagtctatttatctatttacctggcccaagtgctgacactgctttcactcagtgagacagggacagtgagggcgaaggcggatggggttgggagttagccaagaggaactccagggcttgacgctgtgccctgtacttctgcgttgttagaaacttgcataacagtgtgatcgtggccgggcgcggtggctcacgcttgtaatcccagcactttgggaggccgaggcggaaggatcacttgaggtcaggagttcaagatgagcctggcgaacgtgatgaaaccccatctctactaaaaatacaaaaaaaaaaaaaaaagaaaaataataataatagccgggcgtggtagcgtgcgtctggaatctcagctactggggaggctgaggcagcagaattgcttgaacccaggaggcggaggttgcagtgagccgaggtcgcgctattgcactccagcctgggcgacagagcgagacttcgtctaaaaaaaaatatatatatagtgtgatcatatattactcatgtaactaaaaaataagcccacctcaccggattctggtaaggcccagaagtattataaatgtctggtaaacaataaggattcaagttgtagcttctgttataatccagtggtctggggagggtggacaaattgaggtggctcttggttttggtttatgggacttggtagggaaggagttgaggggaactttgcagtaagtccagctaattaattcttcaactacatttcttttggcttgtaaccttccaattagatatatgggtttgtataaaaatctgttaaggcgttattattcaggatatggtaaaacaatgcagtgcaggaaacaactcttataagaccataatttgtatataacttaccagtatatacctagcaattaaggatcatgtattagaaatagtgttctatgattaatcctgcaaaaagatcagtattatattgattaattgattgagagaggatcttattctgttgcccaggctgatcataggtcactgcagcctcgatctactgggcttaagcaatcttcctgcctcagcgttccaaaacagctgggactacaggtgtgtaccaccacacctggctaacttttttttgttcttagtagaaatgaggtctcactatgttgctcaggctgatcttgaacacctgagctcaagtgacaatcccatctcggcctcccaaaatgttgagattacagatgtgagccactgtgcctcgtctgtttttctttttattattaaaaaattcaaatgttataatgatcacttaaatcccgaacacctagattcaataattgttaaaactttgtgatgtttgctttatcaatctgtgaccatgtgtatatttttgccaatccatttgaaaataaagtgttacaggcatcacaacactttacccctcaatacttcaaaattcatcccttgaaaatacttaaaaatgcatcttcttcataatcagtttttcatatctacagattattgataattctctagtatcattttatattcattttcagatgttttcagttttttcaaagaggaactcagccaaagtttacaaattgcatccggttgttttgtcatctttagtgtaaaaattacttattactaagaacaaatcacctgtaaaatttagcatcttaaaacaacacagatttgttatctcacacagtctcttgagagtcaggaatcttggaatgacttagcggtgtggttctggctcagggtctcgtggaggttgcaatcatctgaacgctcaaccagagctggagtttccaactctgtgaggacacacttaaagccatgattggcggcaggtctcagctccttgcagggggacctctccacagggttgcttgagtgtctttataacatggtgcatggtgagctgagagggacaaacaggaagccttttataattttataacatctgttatatcctaactgtgaagatacccactgtcacttatgccatagtctattcaatagtccagcatacactcaagggatggggaattatgcctcacctggagatcctagcagtggtggctttaaaatatgtccacaagttctttgaagcttctcccatcttcagaatatctccatgttctatttaacctgcaccttttaaatattctgatattttgactgtttggttctgcaaatggtggaggggcatacagtagtcccctcttttccctgagaaataccttccaatactcccagtggattcctgaaactcaggatagtaccagattctatatatactatgttttttcctattacatacctattatagtttaatttatagattagctacagtaaaagatgaacattagtaacactaaaatggaacaatgatagcagtatgctataataaaatttatgtgaatatggtatctctctcaaaatacttaattgtactgtacttacctatttttggactgtagttgactgcgggtaactgaaggataagtggggggactattgcataggatttgggaaatgttcacagtgtccatagaatcttggggttgattataaaaataggtgaaagaggaacctgtctgttttagtgtaatgcagttgccagtatctttgctaattattaaggatgagataaggtgtgctagctccctgatgttatatgaaattgtcatcccccacattcaaagccgtggagtggaaggtgaagcattctctgtagatggcttgagagatcaacaagggatatttgcattgcagtggtttacagggactgcttgctccaatttggcacttttcattacaacaaatgttataggaatcattttcagtcagtctgcatatgcatcagtaacataaaatcatccacaaataaagcatgcatgtatgtgtctccccactggccagtgaagaaagcctgtctccctaattgactgaggaattctggaatgagtcatggtttaagaaagcatttgaaagccatttaacctgagagttgtgctttcaattgaggtccagttaaatgctgtctgtttccatgattctagagaaaaggcctgtgggtttggtcagcattactgctcagataagcagctcttcctttaggaataaagcagtgcttatagcaatctgccctttatgtagtgataaattactttaaatgctctatctcacactgttggaaatttgtgtttggagactagtgagagcagtggtggagcttgagagcttaatttgcttcttgttaagccacttagaggctcacatttaacatgtgagcctgttttcctgtggacctcaaacacaggccacattggtttagtgcattggtctacaatttacccaaaactttttgtctctttgaggttcatatattaacctgatagccttagaatgtttctgacatttagtcccttttctgctctcaccccggaaataatcacaaagggcattctagggatcattctgagtgtattgcaacagtgaccctggatccacaagagggcacttttgattggggttggtttaaaatccttcagcagcctcttatgagaaaggaagtgggttgattacattgttatcttcttcctttcaggcctggcagtcatgcattcccagagcaccaatcagcttgatgtggggaacaatccccgtgtgggcaccaagcgctacatggcccccgaagttctagatgaaaccatccaggtggattgtttcgattcttataaaagggtcgatatttgggcctttggacttgttttgtgggaagtggccaggcggatggtgagcaatggtaggtatctaatctaatataatattgtcttaatccaagttctcttgatccagctacctttaaaagggctgaagggactattgaaattcacattgttctttgaatcgtacgtgtcgagttataggcattcatatttgatttatggctggtagatggagtgtaatggcttttatgtttgaaatataccacagtaagtgatggttgaaaaccagtatttctggaagagaccagccattccttggtttttctttggatttgttccagatttcttttcttttaaatttttaaaattgatacgtaatacttgcgtttatggggtacatgtgatattttgataaatgtatgtaatatgtagtgctcaaatcaggacatttaggctgtacatcaccctgaacttttatctttgtgttgggaacatttcaaatagtctcttctagctattttgaaatacatagtatattattgtcaactatagtcatgctactgtgctattgaacattagaacctattttttccatccagctcttatgtttatagccattaaccaacgtctcttcatcccactgctatcctcacccctattccccaaccttctcagcttctggtaactatgattctactctctaccaccatgagatcaacttttttagctcccacatatgagtgataactggctgtatttatctttctagataaaagattatgtcacctgcaaagagggacaatttgacttccctttttccacattgaatgtattttatttctttgtcttgcttgattgctctgcctaggacttctagtactattttgaataagaatggtgaaagtaggcattcttgtctttgttccagttcttagagaaaaggctttcagcttttccccattcagtataaatttacctgtgagtttgttgcatatggcccttattatgttgaagtatgtatattccttctgtacctgctttgttgagagtttatatcatgaagggatgttgaatagacacagaactttttctgcatatattgagatgatcatgaggtttttgtctttgattctgttgatgtgatgtatcgcattaattaatttgcatgtgttgaaccttccttgcatcccaagaataaatcccacttaatcatgatgtgttatcttttttatgtgttgttggattcagtttgcttgtattgtgtttaagatttttgcatctgtgttcattaaggatattggcctgtagttttctttttttgttgtggtttccttgtctcgtttggtatcagggtgattctggactcagaatgagttagggacaattcagtcctcttcaattttttggaatagttcaagaagaagttctatttaagtttggaagaattcagcagtaaagccatccaatcctgaggttttctttgtgggaatactttttattaccgactccatcttgttattcatggtctgttcagattttaaattttcttttggttccatcttggtagattatatccatttcctctaggttttccaatttgtttgtaataatctctgatgatttttgtattcttgtggtatcagctgtaatgtcttcttttttgtttctgattttatttatttgagtcttctctccttgtttcttggttagtgtagttaacagtttatcagttttctttacctttccaacaaactaactttttatttcattaatcctttgtatgattactttttggtctctattttgtttagttttgctatgacctttcttattctattaattttgggtttggtttgttcttgcttttctagttccttgaggcccatctttagattctttatttggaatctttcagcttttctgatgtaggtatttattgttacagacttccctgttaccaattcttttgttgtatccgattgactttggtatgttatgtttccgtttttatttgtttcaagaattttttttatttccttcttaatttcttcattgacccagtggttgttcaggagtgtgtttttgaatttccatgtgtttgtacagtttccagagtttctcttgttactgatttctagttttattccacttgttgagacttgttttgtggcctaacatatggtctattcatgtgctgatgagaataatgtgtagtctgtagctgttggataaaatgttctgtaagtgcctgttaggtccatttggtctaaagtacattttaaatccaatgtttcttggatttttctgtctagatgatctgttcagtgctaagagtaggatgttgaagtccccaactgttattgtgttggagtctatttgtctctttaggtttaataatatttgctttgtataaaaatgctccagtgttgggtgcatatatatctagaatcatgatattctctcttcctttatgattatacagttgaccttgcacatcacaggtgtgaactgcatgattttttcaaccacacgtgaacaacaacaacaacaaaaatacagtatttgtgggatgcaaaactgagtatatagagggcctactttttgtatctgtgggtttcacaggacgaactgtggtattgagtatctatgtattttggtttagactggggtcttggaaccaatcttccatgtatactgagggagcacagtatactgaccttttgtggtctctttttacagtttttggcttaatgtctgttttatctgatagaagtatagctacctctgtttgcttttggtttttatttgcatggaatatctttttttatcccttcactttcagtctatatgtgcctttacaagtgaggtgggtttcttgaagacatcatgtagttgggtcttgtttttaatctatttaaccaagtctatattttttaattggggggatttaatctgtttacattcaaaattattatttataggtgaggacttatttctgcctttttattaattgtgttctggttgttttgaatatccttcatttcttctccttttactgtttgtttttgtgtgtgtgtgtgtgtttgtatattttctccttaaatttgaattttttctccttctcatttttgtgtctgctctaccagtgttttatgctttcatgtctttttgtgatggcatatatcacccagatatagcatttccttatgtgtttcttgtagggccagtctagtgatgataaattccctcagtttttgtttatctgggaaataccttatttttccttcatttggaaaggatagctttgtgttgagtgtagtattcttggctgacagttttgttttttctttcaacatttgaatatgtcatcccattctctcttggcccgtgagattaccactgagaaatccactgttagtttgatgggagtcttttatatatgacttgatgcttttctactgctgtttttagaattttctctttgtcattgactttacaagtttgactataatgtgccttggacaataccattttgggctgaatctttttggggatctttgagcttcctatatgtggatgtctatttatctcttgaaagatgtgggaaatttcagctttttttgggggatagggataagttttctatgcctttgcccatttattttccttctggaaaacccaaaatttgaatatttggttgtataatgatgtcccatatatcacgtaggctttgttcattcctttttggttgagtgtttgtttgtttgactggctatttcaaaagacatcttttcaagttcagaagtctttcttctgcttgatttagtctccggattgcatttttaaatttccattcaggttgctgtgaatgccattaattcattctttttatgggttagtagtattctattttatatatatatatatatatatatcaaatatatatatatctcaaatatatatatctcaaatatatatatataaatatatataaaaaatacgtgtagatagatagatagctcacaatttcttatccacttgttgattcatggacatttgggctagttccatatttttgcagttgcaaactgtgctgctataaatgtgtgtacaagtatcttcttcgtatagtgacttcttttcctctgggtactcagtagtggaattgctggatcaaattgtagttctacttttagttctttaaggaatctccagtgtttaccatagtggttgtactagtttacgttcccactagcagtgtagaagtgtttcctttgtgccgcatccacgccaacatctgttattttttgattttttgattatggccattcttgcgcaagtaagttggtatttcattgtggttttgatttgcatttccctgatcattagagatgttgagtatttttaaaatatgtttgttgaccatttgtatatcttcttttgagaattgtctattcatgtccttggcccactttttgatgaagttgtttttttcttgctaatttgcttgagtcccttgtagattctgaataatattcctttgtcggatgtatagattgtgaagattttctcccactctgtggggtgtcagtttaccctgctgactgttccttttgctgtgcagaagctctttaattaagtcccacctatttatcttcgcttttattgcttttgcttctgggttcttggtgatgaagtcttttcctaagccaatgtctaaagggtttttccagtgttatcttctagaatgtttatgtttcagatcttagatttaagtccttgatccatcttaagttgatttttatataaggtgaaggatgaggatccagtttcattctcctacatgtggcttgtcagttatcccagcaccatttgttgaataggacatccttccccactttatgtttttttttgctgtgtcaaagatcagttggatgttaagtatttgggtttatttctgggttctctattctgttccattggtctgtgtgcctatttttataccagtaccatgctgttttggtgactgtggccttacagtatagtttgaagtcaggtaatgtattatttccagattttttccttttgcttagtcttgctttggctatgcaggctcttttttggttccatatacattttaggattgctttttctagttctgtgaagaatgacggtggtatttttatgggaatttcattgaatttgtagactgcttttggcattatggttactttcacaatattgattctacctatccatgagcatgggatatgtttccatttgtttgtgtcatctgtgatttctttcagcagtgtcttgtagttttccttgtagagatcttctgcttccttggttaggtatattcctaagtattgtattgtatggtacggtatggtatggtatggtatggtatggtatggtatggtatggtattatttgcagctgttgtaaaagggattgagttcttgatttgattcttagcttggttgctgttggtgtatagcagaactattgatctgtgtacattaattttgcacccagaaactttggtaagttcttttatcagttataggagctttttggaggagtctttagggttttctaggtatacggttatatcatcagcaaacagcgacagttagacctcctctttaccagttcacatgccctttatttctttgtcttgtctgattgctctggctaggacttccagtattatgttgaatagaagtggtgagagtggacatccttatcctgttacaattctcagagggaatgctttcaactttttccctgttcagtataatgttggctgtagatttgtcatagatgacttttattacattgaggtatgtcccttgtatgccagttttgctaagggttttaatcataaagggatgctggattttatcaaatgctttttctgcatctgttgagatgatcatgtgatttttgtttttatttctgtttatgtggtgtatgacatttattgacttgcatatgctaaaccatccctgcatccctggtatgaaacccacttgatcatggtggattatttttttgatatggtgtgggacttggttagctagtgttttgttaaggatgtttgcatctatgttcatcacggatattggtctgtacttttctttttttgttatgttctttcctggttttggtattagggtgatactggctttatagaatgatttagggaagattccctctttctctatcttgcagaatattgtcagtaagattggtaccaattcttctttgaatgtctgatagaattcggctgtgaattcatctggtcctggacttttttttcattggtaattttttaaattaccatttcaggcttgctgcttgttattggtttgttcagagtttctaattcttcctggtttaagctaggagggttgtatatttccaggaatttatctatctcctctaggttttctagtttatgcacgttaaggtattcatagtagccttgaatgatcttttgtatttctgtggtgttggttgtaatatttcccatttcgtttctaattgagcttatttagatcttctctcttcttttcttggttaatcttgctaatggcctatcacttttatttatcttttcagagaaccagctttgtgtttcatttatcttttgtattttttgtttcgatttcatttagttctgctctgatcttggttatttcttttcttctgctgcgtatgagtttggtttattcttatttctctagttccttgaggtgtggccttaggttgcctgtttgtgctctttcagatgttttgatgtatgcattttaaggctatgaactttcctcttagcactacctttgctgtattccagaggttttgttaggttgtgtcactattatcattcagttcaaagaaatgtttaatttccatcttgatttcattgttgacccagtgatcattgaggagcaggagatttaatttccatctatttgcatggttttgaaggttccttttggagttgatttccaattttatttcactgtggtctgagagaatacttgatgtaatttcagttttcttaagtttattgagacttgttttgtggcctatcatatggtctatcttggagaaatttccctgcattgataaatagaatgtatattctgtggttgttcagtagaatgttctgtaaatatctgttaagtccatttgttctagggtatagtttaaatccattgtttctttcttgtctttctgtcttgacctatctagtgctatcagagaagtattgaagtcccccattattattgtgttgctctctatctcatttcttaggtctagtaataattgttctataaatttactagctccagtgttaggtgcatatatatttaggattgtgatagtttcctgctggacaaggcttcttttttttgagatggattctcgctctgtcgcccaggctggagtgcagtggtgcaatctttactcactgcaacctccacctcccagattcaagcgattctcctgcctcagcctcctgagtagctgggattataggcacccaccaccacacccagctaatttttgtatttttaggagaaacagggtttcaccattttggccaggctggtctcaaactcctgaccttgtgatctgcccgcctcggcctcccaaagtgttgggattacaggcgtgaaccaccacacccggctgtcaaggccttttatctttatttagtgttcctcttgtcttttttaaatgatgttgctttaaagtttgttttgtctgatacaagaatagctacctctgcttgctattggtgtccatttgcatggaatatcttttcaaccccatttaccttaagtttatttgagtccttatgtgttaggtgagtctcttgaaggcagcagatagttgcttggtgaattcttatctattttgcaattctgtatcttttcagtggagcatttaggccatttacattcaaggttagtattgagatatgagatgctattcctattcatcatgctatctgttgcctgaataccttggttttttcaaaatgtatttatggtatttttttgttttataggtcctgtgagattcatgctttaaagaggttccgttttgatatgtttccaggatttgtttcaagatttagagctccttttagcagttcttgttagtactggcttggtagtggcgaattctgttagcatttgtttatctgaaaaagaccgaatctttccttcatttatcaatcttcgtttcaagggatacaaaattcttggctcataattgttttgtttaaggaggctgaagatagggccccaatcccttctagcttgtggggtctctgctgagaaatctgctgttaatctgataggtcttgaatcattttttggatttccttaatttggacttcacctttctctggtgcctccttgattagcttaataaacgaccttctgaattctttttctggcaattcaggaatttcttcttcttggtttggatccagtgcgggtgagctagtgtgatttttggaggttgttaaagaaccttgttttgtcatattactagaattgtttttctgattccttctcatttggataggctatgtcagagggaaggtctggggctcaaggctgctgttcagattcttttgtcccacagggtgctctctttatgtagtagtactcttccccttttcctagggatgtggctttctgagagccaaactgtagtgattattatttctcttctggatctagccacccacacagggctaccagtatccaggtggtattggggggtgtctgcacagagtcctgtgatgtgaactgtcttcaggtctctcagccatggataccggcacctgctctggtggatatggcaggggaatgaaatggactctgtgagggtctttagttgtagtcgtttgatgtgctagttttgtgcaggttggcttcctgccaggaggtggcgctttcaagagagcattagctgtggtagtataggggaggatcaggtggtgggcagggccatagaactcccaagagaatatgacctttatcttcagctaccaggatgagtagagaaagaccatcaggtaggggcagggttaggcgtgacagagctcagactctccttgggtggggcttgctgtggctgctgtggggaatggggttgtggtttccatgtcagtggagttatgttcccagcattatggctgcctctgctgtgtcatgcatgttgtcagggaagtaggggaaagccagcagttataggccttacccagttcccacacaacccaaaaggcctgtctcactcccactgtgctccccaccccctcaacagcaccaagtttgtttccaggcagtgggccagcagggctgagaattgctccaggctaccagcttcccagctgagaaagcaagcagggcttgcacgccttcccacctgtcgagtctggacaccggattcctgccctcccctgagttcgggcaaggaaactttgcattcggttagaatttttacacagttcagctggaggtttccatctccccgtggtcttttcccagttcctccggcagcccttcccaaggaccgctgtaagacaagtcagaaatggcttccccagggaccaagagagcccatagggcatttcctgctgcttcctgtgcccctgtatttcattcagctctctaaattgtctcagctccaggtaaggtcaaatccttcttccataatctggaccttcaggttccccagtgagggtgtgtgtttgggggtggacagtcagtcctcctttcccactttcacagtttgggcactcagagtatttggactgtctcccaggtcctgcaggagcagtccacttccttcaaagggtccgttgattctttcagctttcctggtatattcctggagtagttattggagcaaaggtttatggtgcgagtctccacacgttgctctgtccatctaagtgggagctgcaatttagtcaggcctcctatctgccatcttttccccaacctctgtttgatttttttttttaatgatacccatttctttaatttgccacagatcgtgaattgtttttccaatttatttgtgtatttttaacttgtgttctcttatatctcactgagcttctttaatattattttgaatttgttttcgggcattttacctattttttcttcattggaatctgttgctggagacttattgtgttcctttactgtgtcatgtttccttgtttttttcatgttctttgtgtctctacgttgatatcagcacatctggtataacctttgtttctcccaattttatggtttggtttttgtagggaaagactgtctcctatattgggttggtagggcgctttggttttgattctgggtgtgttcactagtgtagtatccatatgattacttcagctgtaattggcatcagtggtgtctgtgagtcctttttggtttaggctgaaattaatggaggctgtggtgagggttttcttgggatagggatgccaggaagactggtccttgggcacaagtggttgtggcggcaagccaggcatgctggtcctctgctcctggatggcatatgtgagcaccaatggaatcgaatgcaatggactcatccttgtgtctccaggcatcttgctcaagggccagcaatggcagcggtggtagacaggctcatcatcaggcttctgggtggcttgtgtggcattgatgatgacagtagtggaatgggccagccattgggcctccaggcagcaagcttgggtaccagcctactgggaaggccagtcctcaggtccccaggaggcatgctcaggctccagtggtgaccagcagggcaggtcattccctaggctgtcagatgatgtgtgtgcgggtgctagcaggctgggcgggctcatcctcaatcccccagaaggtatacacacacaccagtggtggcagcaggctgagcagacaatccctaggcacccagatgatgcacatgggccctgacaggggcagcactgggcgggatgaacctgtcctcaggcctcccattggtgcacatgggtgcaggctgtggtgggtggagcaagttgatccctagacccttcgaaattgtgcttaggcactgcaagtggtgactcttggtggcggaagcctttcttcagacctccagatggcatgcttgggccctagaggtgagtggggcaggcctgttttcagagccccctgatcgtgcctgtagacaccagggatagtaggtggactggtccgtatttcattcttgtctttctccagcttcctgttttacctttcttcccaccctccttccttttttgttcttctcacaagggagttttaacttgaggagaatgatcaagtgaatctgagggtgaattctgctattttctaggtattttgacttgttaagtttggattgttgagaaaagtctcagtttttgcactcagaagtcacttatttataatgagcagactgtacctactgaaagagtcaaatttaaatgcaggaagccctggatagatggcctatgttgatctgtttataagtagttttattaaatggtgatgccttagcagttaaagaagcacttgtcaatcatttttaacctatgtcccccacagtgcgctctcacccttgcctttcatgtacccaaatcagccacaaatatactgttgaactttactttaagtacattgtattctgaaagcactaagtatactctttcaaattgggcatgccccaactacccacaaagtggtttttatagcagaatcccttgaattaactagatgaacctcttcatatcttcacaactgaaaatcttatttcacagagcatgtgtctgaaactattccaggaaaacagaagaaaatgccatatatttagattaatgttcatttccaaaagatgctttacattttagcctcctgtgacccattggagtcctggattagaagaaataatgcatgaagtctctaatagctgtttccattccacattccactgatgttttctcctaaggattgaggtttgtgggcaatcataattttcatgaatagcacagccagagatgaggactttctgtgaggtagtggaattggggtaatttatatagttttagtgtacaataattaaaattggcatgcctttaggtggttttttttcctaatagcagagtggatctgctttgaacaaaccttctgagggtatcaaagtaggtgttcagattaaacatacatggattgtaaattgacagttctttttaaagttgttttttttttttaatggaatcatgaacgttttcttggtaattgtttctcaaccactgggagctgctgccttgcagtttctgcccttgatgccccttgagaattgtttgcaacagagaaattgttttgcagatttataaagttctgaactttgcctgaaattgcacgtcagcttcatttcctcaccccctccccaatcattcttaaacaccttcgaactgaaaattttaattctgattagtttatcttaacaaacaatttagagaaggattggtgtccaaataaactgtatgatgtggaacttgccccaaatgaagaggaagttggcattccatagctagacagtagcatttccagctgtgggggtgccagagctgagccaagcaggcctgctcagcagagacttgggattcaggctttgtaagaactcgtgttgcaaacccgttccctgtgttgcaggcataaacccaagtggcttttaaagatcagctgtgattaatagtagtcagttggaagtcagagtcatcagtttaaaatttagctcaacaaatggtggcttgcttggtagttcctgtgtttaacattatttttggaagaaaaagaaaaaaaaggaaggtagaggaagggagaatgttttgattgttttctaatttattgatctctcccttgcatcatcaccaagactgttaactggttcccagaatgttgtgggttgagcttctgtgctgtaatgtggtttgatttttttagaggggagataagggtatctcctgtctcatttaaaatcagccactgtcctttggcaatgactaatttgatattttctcttttgttctctgttccctcttctatgaacattcacgtgtgtatacacacaatgtacacccccccacacacaaatcagtttatctaaacttaaacctgaaagtattcaatgctgcttgcaaacctgttttactactgttagtcttttaattattactctcccaaaacagaaaaaaaatgagtaggagaaattgtgccttcaaattttaacattcacatctttttctacttctgtatgcacccatttttaaaacttagttgtaatcatatatagatataattccgtatcatcttttttattcgtattttttttaatcttgcttaataggctgtttttattttaaatggtcacatgacatcttattagcttaaccatttccatattgttagatatcctgtttccaccatttggggcctattgtagacatttttgtgcacatgatgatttcgttcagggaaatgattcttaatctgaaaataagtagacttaataggtcaaagaatgtggatgtttttatggcttgacacatattgccaagttgcttttcataaaagctgtactaatttacaatatcccccataccctagggtgtgatgtgcctatttcattttcttagcagctttaggaactgtcattaaaagaatatatatttttgaaattattgcatataaaatgtatctcatttaaatatatgaatatcttctgtgaggaaggtcattataatgatacatcctttgagtttctgaatgcattataaaaattgatgaccagatagatctcttggagtaatatgatcctcaagtgaaccatgagcataaaaatatgttgcatttttatattttttattggaattttacatttatttgctactaataataaacctcatgctgtttctttacaggaaatgagagttaagtccatttttgcatctgagcatttctcaatagtgtcctttggaatttacttttggtgtttaatttgacattgaatttggaattggtaggaaagaaaacggctttcttaccttccctgtgtgaattttccatatgaacttaaggcaggggttcactcggatcgatagtttttaaactggaatgtgcatcacagtcacctagagtactgaagacacagattcccggggcccagccccagcatttctgatttagtagttctagggtaagaaaatgtgatgccgaggctcccagccaaatacacacgagagtttttgaaaaaagacggtgtacccagattgaatagacaaacaccaatttggttggatacattagcatgatgtgcttctgtcttccttgctgtggttctcttagggccattgcactgcatacagaagtctgtgtgaagagtgcactccggagctgtgtggggtttgtgctgggtctgtgggaggcagtgaagtggaatcactaacattccagagtctgacgtcatactctctgactcgatgacttacatcagtttcgttatttaaaaaataataatatctactttaaagggttatggtgattaaatgagatcgtatatgtaaagcatctcatgtgtgtctggcatatagaaagtgctttggtatggtttcctttccacggaaaatgggtgatgaaggccacccaggagcttgcagatcacagtggccgtcttctgcctcttgttttgctacctcttggccctagtacatttgtttcccctcttcactgcccacaggaaggctctgtggacatactcttgtttcactgttactggctttgattattttgtgatggaatccagggttaaaatgtgtcaaaaaccatttgtatcttgtagaaaaatccttgctgaccaagttgtgcctcttatggggtggggactaggacatacttgttagaataagcttatatttggtgcacttactttgaaaaaagaacctcttctaatgaatctttgagtcagccagggagctgcttgtgcttctgctcctaagtgcaatggggcttgtgtatggaaaccatgacaactcctatttttgtcagcaactcaatatccaacatgtttcatgacgttaattacctacttttgtgtgtattaaggtttgcataagaggataaatcatattagggccaattttttgtattcattaatttcagtttttttgtttgttttaacatttaggacaatgactgggggcaggaatatggaggtggggtgggagggaagaattattttccccctgacttcctggaatttcatgtccctgatttagagatccagaacagaggagagtagtcaactaacctcatgacaaaataagttgaaggctgcaaaactttattggctgctgtttactgactagtagtctcttttccttgacacacttctaaaagcagtctttcaccaagagaaatatctgtatcctaaaccttgtaacagccacaacattcagtgaatgatacatttttctgaagaagcctttcttcatagctaccaaatgtttggaactcttgtggtgctcctctctttctcgattttggaggtatgcaagctctaaggctgtcttgttcatagtttaacccagggaatagccatgcagcatctctaggctttttgccctctcctttgacaacttacagtaatattgacacatgcttttagtagggtccaactacacagtaatctataaaccatttacttttgctgtgttacatcgatgagaattccaacaatagaaattaattttataattttaacagattcctgagaatgcaattagtttggactttgagtaatgtacatggctccgtaagcccatgaattacaatgggctagaggggcaggacacagctgtcacagcatgtactttacccagcatgggacaaggctgtctttccaactcctgttttcaggaagaagtgcctgccatgagttacaggaatgcctgaggtactgattctcataaccctctggcagtgtggccgggccaagcggccagaactcgggctgtcatcccctctgccatgaacagcctcatccatttattcattagtcatgttttatctgtgccgtggcatgagaaatatctcgaagccctcttgtgaggtatgttaggtgaagtaacccaaatattggatatacctttttgaatcatgtctcaccaggaagaatgatgcctttctgtgaactcagtgtttcccaattcattcatactgccctcatcatttttttccatatccaaatgctactttgtgccatcatttacagaatcttttccttcaaattggctaactcttttcaaagttaattttgttttgaaaggaaattattatcactgctggaaatggaaaaccagtatcacatggcataaaatggaagataactatgaaaataaatatgtaactaatgagatgaaaaagtttagtccatgaaccacatcaaattttctcacgtgccacacctgaaggaaacactgtattcacttatagtgctctcagatgccaaatatgggccattttctttttttccctctctaaaatagctttacttctaatgctctgtcctctgaaggatttcagcgcttctgtaggagttaattgttaaaaatagctctttgtatggatatacatgccagagactctgtcctcattacctggatatctgatgtgactacccaagttggaggattatgaagagagtttgtaatgagaagtaggcacactgtggcatgagatgcaaggagagagagaaatgtctttcattatcccatgggtggcttgtaagggagaattctagaatataaacagaaaattggattctagtttaactttgccattaattagctgtgaacttgaaaagtactttttccaatgtgaccctcaatttcttttgaaggaaaggaaggatggaattctcatggctctaacttcccatcagttcctctttcccttacctttggctaattcaaagcatagccaggtccacagtttcttatctgcaactgagaagtccccaaaactttgaaactcgaaagctttttcataacttatttgacagaacacttgacctgaactcatgtgatagtcaaacatgacctgaatggacgtgtgtcagtgtataacctttatttattccatctagtgtgactggtcatatattttgctgaagaaatatatttgatcatggggatactccttagactttgctggggatgttacataaaatatagggtatgctattacctttataaaatgtaaaaagttccaaatttggcaaatgcatctaaccttgagagttttgaaaaaggattatggacatatataatcaacatttatttgtgtatctagtgtctgtaatacactaggtgttgtgttaggctctggggaagcacttgggcaaaaaatccccagaatatccgatttaaaggtgctcacattcttgttgaagagtcaaattattataaataaatagatcaagtcactgtggttgaggtatacaggaaagtgactgagtatgggggtgagggcactgaactttgtctaggcccctgtgttgtggtagcaggatgggacagtcttctcagaaggtgagaagcatgaattgagtcatctgtgggttgaataagaacctagttggacaagcttgggaggatgtgaggtgcaggtgggaatgagaaataaaacttgaccacgatgacagttggtatgccagacaaaaggtaggctgaaggatcccataaaggtgccctgttgatggaactacaagtaattctggtgtggctgatgtccaggtatgtgaaggacagtggtggggaatggactttggtggggagggagtgggctcccatggacggcactgatggaaaacatgcagaggaggggcacggtgaactcctttttcagctttctcctacagatctcactgagggcagtgggatagggtggaggttggcaggggaggactgatgcagagagacctgcgggtcccacatgcagctgtcaagcggaaagaagatggctgtctagttcaggacctcgggggcaagatcttgaggaaggacttgtttctggacatttgagaggctactggcgtttcatgcttttcaaagtgcatgtctaggacatatttgatctgcacgttggctttgtggtgtgtgctttaaaggtattggaaaactaaggcctggcagctaaggggtttactcagagccatatagcaaactaatgggagggatattggttgataaagataggcttaccccaaaaaagagaaaactttcaactagacatatgcccaggaaaaaactattgtataaatcagacacccctgccaaaagttgtgggggagtaggttatgaataatgttttttatttctttctcgtggccctttgagtcacgctggccgccttacatgggaggcgaggcctggctcagtctgttccgtccctggccaccatttaagagcgcctcttcccctgccttcctgtgtcatttgttgtttgcactgctcatttggcacttgaagtgctttgtatttttagttacttgcctgaattcatgctgtgctctttgctggctcacgatttggcagtaacttcttgggtgctgcctctaaaggacttagagttcacttttttgcctggctacgctgattatcgctttctggcagaaatgaggcactgttgtaaatcagtcatttcctaccttgacagcaggtgtcacctcgcagtctggcctcacctcctgtccccttcttctcccccggctctcctgccaccacatgcacctatttcagccccagagaacttctctccacctctccaacgtcagaggatggtttgtcagttcctgtccttgccccatagcctccctctgcctggaatgcacccactccgtaggggtttctcttccctgtcatcttttctgccttgcaaactcttgacctttctattctgcccatgccccacttccctcctggaaggcttacctgtgcttccacggcacccagtttatatatggggacttgtgataccatggaggtgtttcctcctctgagccctgccaagtgccactgtccctccccactgtcttctctgttctcttccctctaaagctagtctgtaattttttttctttcacctttctcattattctgctcctcattaccaacactgcatctttttcttttcttttttcttttttttttttctttttggagacagagtctctgtctgtcaccaggctatagtgcagtggcactatctcggctcactgcaacctacgcctcctgggttcaggcgattctcctgcctcagcctccctagttgcctggactacacgcacacaccaccacaccaagctaatttttgtatttttagtagagacggggtttcaccatgttaccaggatggtcttgatctcttgacctcatgatctgcccacctcagcctcccaaagtgctgggattacaggcgtgagccaccgttttttcatcttttatccctcctgccaagcacagcctcgggcacacccagctaatcaaaatggccattgagtcaatttaggatctcacaagtgaaagtagaatgagaatttctaatatagttttgcctttcaaggtacaaagtaaatgggtgaaaaaagattttgaggttctttttgacaagatttccattgtctcagggaaaaaaaaatgagagacttgtcctgctcttccactagacttttgatttccttggaaaacaagagcatgtcttatatttttatcactctcagcatttaatacggcatcctaccatagcagtaatgcactttcaactgatttattgcttgatcagagggagttcgtagtgactgttagagcttaatcccaggtttattttattttggagaagcatggccagcgtcaggtgaaaacaatcaacagttggccaatgattgaggaaaaagaggcttgactaaatcccagggataatcagttaaatggtcttttaaaaatacttgactccttttattaaaacatggggacatttaataaaattgaaacatgggaaacggaaacacaagggcaaacttcagctttgtatagtgaaattcattgtttggtatcaccagatctcatgttttaaaaatccagccatgctttgtttccttttgcatttatagaaaacttcaactttgtattaccgttcacattcacataaccctttctaagctcaacaggtaaattactccaaaaagatggctgttatgctagatttttaaatattaagccaggctattaaatatattctctttcagaaaaattgagagatggtgaagggcacgtgtcttactgttttctgtaaattcttgtgaccctagaaaacgcataaaatatctctctaggtccatgttcagctgtattttagatggtgtctgttagtactgaaaataattaaaagatttttgtttgaatgtttcctgggatccttacaggagaagaagggcctctaagatgaggtgttccaagatttctgagagtagcagtttatacccaatatgatgtttatgatttgccaggaaaggttttaatccactgactgatatgcatttcaaatgcagttacacaatgtgggtaagttatttggaattaactagtttttttttttttttgagacagaatctcactctgtcacccaggctggagtgcagtggtctgatcttggctcattgcaacatccacctcccgggttcaagcaaatcttgtgcctcagcctcctgagttagctggaactacaggcacgcgccaacacacccggctaatttttgtatttttagtagagacagggtcttgccatgttgcccaggcttgtctcgaacactgacctcaagtggtccacccaccacgacctcccaaagtgctgagattacaggcgtgaacgaccacacccagcctagatttttaaaaaatataatttagacttgtttccatctcaaatataaacctttatttagccaaatttgtgaagttttaaaaagatatgtagcatttcttgaaaagatgctccttatatctaatcttttgcataaatggtttgtatttgtatggaatttgtaaggatggattcccactgttgagtaatttctgtgataaatgaaaagggaattgaagcttttcaggtggcttgtaggaactagaacaaccgaattacaactttcctcacactccttctgtcgcctccaacaacttcttaggtatttaggaatagaagaaagtcgcctggaggaagaaaagagagcagtaaaccaagttattacctcattgtttgaaccctttgttgagggaaaggaaataatagatgtcttggttttatttctatgaaggggaagaatccattttctaattccaaatgatgaagttaaaaatttttctgtttaaggagttgatataattctgctggaaaagaaaaagtttccaggccattggaaatcatgcaggggcagaagctggtattagctactgttcatatttgcttttgggcagaggaagagttcattatttatccttcttttcctctgccttcccacatggctatcctctttacattttattttgtgccttcaatatgatagtaaataatagagccatcagtcagacagctgtgcctgtagttagagggtactcagtacatgtagaatgaatgaatgaggaaatgagtatttcctatgatattatttgcatccctcctaatggaagagattaatttatagcaatgtttttcttaacaaaatacttttctaacaaagaaaggggtattttgatgatggtcttggtttattactccctagctctagtttgtggacaactttttatttctatttatggtttgaaaccactagattcaggtactttccataggtagcttgggtggtttttatcaccaaaggaatttttgttctatgtctccagtgccctgttgggcgttacagagctgttaatatacactgttggagaattttgctaatagttatgattacatgagaagttttcacgtatttccttctaacaattatccttcttccaataccatgcagggtgtgtatttattgcctttttctcccacctgttttaggacctacctctagcttccaggactgccctgaggtatgaggaaggtgattagtattttcttctgtcacattataacctgtgacacccatcaatgaaaccttggggcaacctgtactctcttgctaaccgaacacaattcttgtccttgtgtgcaggtatagtggaggattacaagccaccgttctacgatgtggttcccaatgacccaagttttgaagatatgaggaaggtagtctgtgtggatcaacaaaggccaaacatacccaacagatggttctcagacccggtaagaatgccagtttctcagttttagagctcttttccattgtttgctatttgtttccctttgagtttcaactggtattgcatctgagtgatctgtcccgtggatctgttgttttctcttcctattttatatagaagggtttagatctagaagagtaagttcagaaaaatactccattcttgaagaagccatatctcataggggttgctagtgaatgacaatatttgtaagaatttctgtgaatatgcagcttcaggaatcgggagactcatgactactgctattagccctaagactgcatgtataaaccaagagactttaagtgaagcttttaacctcctttccatctctgtatatctgaaatcccaaacacaagctgctggatgctgaagatcctgtattgctactcataagtagtagcaggtataaaacaatgagaaatgaccctatttggaaatttcaggattatctctaggttagtattgctgcttttggcacccataaaatcattaaggggtccaatctggcctatgtcgtttacctaataaattggtagcattaagagtccaaaggacagagttcatgaaattctaagaatggcctctttatcagtggttaaaggttgaatatttgcttgaagaagatgacagtaacataactctaatttcacaagacctgcgagttcttcagaatagtagacatgatatcagcccagcttccagggccattaaaaagccagtttgtcattgtggtgtttgttctttctctcctcagacattaacctctctggccaagctaatgaaagaatgctggtatcaaaatccatccgcaagactcacagcactgcgtatcaaaaagactttgaccaaaattgataattccctcgacaaattgaaaactgactgttgacattttcatagtgtcaagaaggaagatttgacgttgttgtcattgtccagctgggacctaatgctggcctgactggttgtcagaatggaatccatctgtctccctccccaaatggctgctttgacaaggcagacgtcgtacccagccatgtgttggggagacatcaaaaccaccctaacctcgctcgatgactgtgaactgggcatttcacgaactgttcacactgcagagactaatgttggacagacactgttgcaaaggtagggactggaggaacacagagaaatcctaaaagagatctgggcattaagtcagtggctttgcatagctttcacaagtctcctagacactccccacgggaaactcaaggaggtggtgaatttttaatcagcaatattgcctgtgcttctcttctttattgcactaggaattctttgcattccttacttgcactgttactcttaattttaaagacccaacttgccaaaatgttggctgcgtactccactggtctgtctttggataataggaattcaatttggcaaaacaaaatgtaatgtcagactttgctgcattttacacatgtgctgatgtttacaatgatgccgaacattaggaattgtttatacacaactttgcaaattatttattacttgtgcacttagtagtttttacaaaactgctttgtgcatatgttaaagcttatttttatgtggtcttatgattttattacagaaatgtttttaacactatactctaaaatggacattttcttttattatcagttaaaatcacattttaagtgcttcacatttgtatgtgtgtagactgtaactttttttcagttcatatgcagaacgtatttagccattacccacgtgacaccaccgaatatattactgatttagaagcaaagatttcagtagaattttagtcctgaacgctacggggaaaatgcattttcttcagaattatccattacgtgcatttaaactctgccagaaaaaaataactattttgttttaatctactttttgtatttagtagttatttgtataaattaaataaactgttttcaagtcaaacagtgaaattgtttttcaaaatataaaaaagatctgtgtaacattatgcattttcttatgggagcaatagaagcacaaaactaatttgtaaattgaatttgctttttaaatctactcatgaacttatgtaagacatcataaggatgtcttacagcttgaatttggtataagaaaatttgtttcttcctttggctgtgatttttttgtttttttgtgtttttttttcagtcagtttctccagctgtaaggtgagggtaacaaatctctctgacctgcctttctcacaggggggtgttgtgagtgtaaacgggaaggaggatgttaaagcattttgttgagtgaaaggttccacgtgagtgtaaagtggtcttatgcatccgcccttgctgcttgggagagtccgttctcggttttttcactgcttgtacacaagattaaaaggtagagttaacagtagcccaataagagaagaggtgtgaacatgccggaatgtcttccagaggtaagttaataacttcattaggatgtatttacttggagggtatatattagaatgacatttttttaaattacaaatcaaaattttaatttgtgttacagat

SEQ ID NO: 16 - DNA, 13817 bp, Homo sapiens
atttacatgcgtatggatatgaaaataaatgcatacacatttatgtaaaaaaatttgtacacatgcatttacatatgtaaatacatacatctctatgtattaatgtttaaaaacactcaatttccagcctgctgttttcttttaattttcctcctattccggggaaacagaagcgtggatcccacgtctatgctatgccaaaatacgctgtaattgaggtgttttgttttgttttgttttttgaaatcgtatattaccgaaaaacttcaaactgaaagttgaataacgggcccagcggggaaataagaggccagaccctgaccctgcatttgtcctggatttcgcctccagagtccccgcgagggtccggcgcgccagctgatctctcctttgagagcagggagtggaggcgcgagcgccccccttggcggccgcgcgcccccgccctccgccccaccccgccgcggctgcccgggcgcgccgtccacacccctgcgcgcagctcccgcccgctcggggatccccggcgagccgcgccgcgaagggggaggtgttcggccgcggccgggagggagccggcaggcggcgtcccctttaaaagccgcgagcgccgcgccacggcgccgccgccgccgtcgccgccgccggagtcctcgccccgccgcgctgcgcccggctcgcgctgcgctagtcgctccgcttcccacaccccgccggggactggcagccgccgccgcacatctgccgccacagcctccgccggctacccgaacgttctcggggccagcgccgagtggatcaccggggaccgcgaggcacccgcgcgccgcagaccccgcgcgggctggagcacccggcagagcgcgccacagcgccgtggcctctgctgcccgggctgcgccagagccgcggacgggcgcgcagagcgccggggactccggagccgatccctagcgccgcgatgcggagcacctactgcaggagatcgggggcctgggacgcgctggccgaggtgtgatcggaccccaggctagccacaaagggcacttggccccagggctaggagagcgaggggagagcacagccacccgcctcggcggcccgggactcggctcgactcgccggagaatgcgcccgaggacgacggggcgccagagccgcggtgctttcaactggcgagcgcgaatgggggtgcactggagtaaggcagagtgatgcgggggggcaactcgcctggcaccgagatcgccgccgtgcccttccctggacccggcgtcgcccaggatggctgccccgagccatgggccgcggcggagctagcgcggagcgcccgaccctcgacccccgagtcccggagccggccccgcgcggggccacgcgtccctcgggcgctggttcctaaggaggacgacagcaccagcttctcctttctcccttcccttccctgccccgcactcctccccctgctcgctgttgttgtgtgtcagcacttggctggggacttcttgaacttgcagggagaataacttgcgcaccccactttgcgccggtgcctttgccccagcggagcctgcttcgccatctccgagccccaccgcccctccactcctcggccttgcccgacactgagacgctgttcccagcgtgaaaagagagactgcgcggccggcacccgggagaaggaggaggcaaagaaaaggaacggacattcggtccttgcgccaggtcctttgaccagagtttttccatgtggacgctctttcaatggacgtgtccccgcgtgcttcttagacggactgcggtctcctaaaggtagaggacgcgggccagggcccggggtgggtggtgggtgggagggggatttgggcagccactgcggtagagcccttccttacgtccaggccagaagtaaacagacccctctccagtccacgtgcaacggagccctgcaggggctcccacttccagctgccccgggcgaccgtaagcctcaccctcccggcccgcactcttccacccctctttcttcccctctccctggaatacttttggagctgttaacacttagatgaggtgttttatttatttatttatttatttttaatttttttaaaaacttttttgggtcaaagaaatccctttgagagggtagcccctgggtttcacccgttagctgagaacctgtccgctctgccatggtgatctccattcttcaagtgtttccgggagacttggtttctttgctcagagccgtgtcccatttaggaaagtactaggagtttggggttctccctacttgtttccagaaatgcgaggggtcagtactgaaggatcacttggtactgtgtttttaacagctgacacgtgcattaatagatattcaccatttacgtaatcccgggaagatacatgtgtatcttgactgcactgtggggatgcgggatggagctgcctttcgagacacccctgagggtaggggcctgggacacaagtcataagtggcttcagaagttgtggccttgagcttacagggtctggaagctataagggtgtgtgtgtgtgtgtgtgtgtgtgtgtgtgtgtgtcaggaagttctatacagtgcctctaaggaagtcacatgcaccatttatgtgtgtttatatgccagacagcgctcagcactccgcatttgggtttgtataggggacgcagggtgtcagatcaagcggtggttttcccaggttcccggcattggctgtcagcgctgtgtcacacacaaaaaagtgacagtcattggcgctggtttggttgggggggagggcaaatcccaaatctgatgtcagacgagctaagcgttggatgggagcgataaatcatctggttcaggaacttgggacccttcattatcccaaacgtttgagcttcggtcggtcttacctagactcgtgagtgtgccaagccaggagggcatcctggaggaggcacgccagccaaatgggagaccgggccgcgggggcgcgaggggggaggactgggcggggaactcgggtgactcacgtcggtcctgtccgcaggtcgaccatggtggccgggacccgctgtcttctagcgttgctgcttccccaggtcctcctgggcggcgcggctggcctcgttccggagctgggccgcaggaagttcgcggcggcgtcgtcgggccgcccctcatcccagccctctgacgaggtcctgagcgagttcgagttgcggctgctcagcatgttcggcctgaaacagagacccacccccagcagggacgccgtggtgcccccctacatgctagacctgtatcgcaggcactcaggtcagccgggctcacccgccccagaccaccggttggagagggcagccagccgagccaacactgtgcgcagcttccaccatgaaggtgaggcatggagcagggcgtgggggcggggagtcaccctgcaaagccctccaccgtgggcagactgcagccgtccctgtagaggcagcttggccggggcaccagcggacgtttccactcttgcttctgtactatcgtttctgaatctgattttaactcactgcttgtgtggtgggggagccagggattcccctttagtaactccgcaccctcttcctggcttgcagccagaagagctactcctcctggaagaattggagagaaatcaagtgatggggaagatgagggcaaaaggcatgcctctagtcagctaaacgtgcaagaattccacagagggaaaaggagaaaaagggaggcagattgagatttctttaagtctgtttggaagcttttgctctataaatctgccgcttaagccagggttttagggtagacagagccaagggcagagttttcagagatagtattgaaaaatcaaagcccagggccccaaagtctttctaatttatagttgatctgggcctggtttggaagattttgaatcccaatctaatccccgtgggagatcaatactacaatcaatcttattgtttccacaatgactttcttgtcctgtgcttaaatctgagataggctctgagtagagacaaggcaagccttcagataaaagcgtttgtagcagctgcctgtttttttttcatgtgcaccgaaatgtggatttttttttcttttatgatactacatgtggtttttctaaggtgggatatttctgcttgtttcatcagaagggcatttagtggactggaaatgtcttacagcagctattgaggtctgctgtacctaagttcttagagcaattagtcaaaaatatgttccacttcaattctttttctacacttttaaatgcttctttggcttaatacatttaaaatagagcatgggtttcttcaattcctagaaaagagtacaaaagtgtatatcacagagcaaccacttggcagatatttggggagttgggagtgaagttctctttcttgcctttccctgcttaggtggtaaatttcaagtgggaaatttacactgataatagactaatgggaaatggcacttccagatgttttctcccagtgtgaagggtgacttatacttgtgagagtatttgttggtaatgggaataagtcccaaaggcaagccacatagcagaagatacgttctcattgaggcagctacacattacgacggggacactgaattgatcatcagttcatttacaagcacatttctaagtgaggtgctctctgctagcagaaatcagatttgaaaggcagtaagatctcactccactctttcagaattcatccaatgaaagcagaaatcacctgttgtcatatgtaaaatttgtgtgtatgtgtacattctgccatcttaaccctgaaatgattatagatccagctaatcattcccaggtaatgctgattagaatacttttttttttgtataggaatgtaataagaacaactgttttagacacctcttctggaaatttagcatggaagctctcaactttatttttaaggcctggaagatgctgtgtctctgttacaacttaaaaggaagatcatttaagttagttaacacctaaaacattccattgtgtgaggattttatcagtgatgtctgcatattctcatcattcatctagaagtggtttgatcagaactaaacaggctacacgttattcaactgtgttattttaacttaaaaagcatgcttgagtttataaaatcagaatttatatctttgtgagtgtaaatgttacctgagaaacagtacagaagtgaccaacttgattaaaatcaacttgtaataacttcaggtcttaatgcagttagataatggagaaaagctatgtaattttgccccaaatttcaactaatccatttcttgtctcattatgactaatatatcatccttaatctggatggatatagcacttttttcaagactaatcattgttgtatacacccaggatttgcttttgataaacatccttgtgccatgcatgccacgaaaaaagtttttggtaaaccatgtgatgaaggttgctggctcaagaacagaatttagtttctacagcattaatgagcatttatttgaaaaaagaccataaagacccaatcataagaattacctgttgggttttctttgtaggtgtgatcgaatggtttggtggaattactcgacgagatatcatgatagcattctttcaaccaatatgagtataatgcgaccatatcataggggatctgagacagaattatcagttgtatttttcctattgaattttgtctagtcctttctccagtggcttttatttgggagaatatcagctttgctaaaatgttattgttttcaagatcattaaaaagtgcttcagctacatagacctttggaaactgccattgaacatagaaaagtcagttctgcaagtggaaagagtgttttgtgtattgctgtagttggaaacacattgaaactggttgacttcactggccctccaaaaagtctttatgcttttttgtcagatgggagagagaaagaccaggtgcttcttgttctcctcactctgaaggacacagtcttctttctacatgaaataactggattatttgcctctgtgactgaagctttcaaatagagattaaccctctttccacaaatataattattatgaaaatatccatataatagaaaagttcaagaaataactattgccctgcattagagactttgtggcacaaattcccccgtgcaaacaacagatttggacacatagatccaccaaaaccaatacttacctggtatggttccctagtggccccaggtatttcattgtcattacagaggccacattaagtaggaaaattactctatttggaaatggttgttgagattgaggctttggtgtccagtgatacttccttggcactgacattttccgttccacctgttttttagtggttcccctaaatttctcttaatccctttgcagtgaactattttgcgttcttagacttgctctttgtgtattttcactgagacaataagagaatatttcatcattccgaaggtgttggtgttaagggtgggcagaggccaaatcagggttgttgatgacaaccatgctctctattcctttatttgccattcccttgttgtattttttttaaaatggaatgtttttaaccttttgtatttgatattttttttctccttgatcagttgtctgttattttattatctggaaaatcttatattatactcagcctctttcattttgtgttagggcagtgacttccagccttactgattgccagcatatccccaggttttgttgttgttgttgttgttttactggagattttttagcccaaagtgtgttttaaaatcctcgaagcataacggtaacttacttttttgataaaacttaccatactttatttagaacaaaagggcagccacaaaatagcagtggctccttataaaatagacacattccagtgggccccgtcacttttctgctcatttctgtctgttctgtccatcatacctaagtcatatatttctgttcatttagttgggacagaactcacccaatgttatcattgtactaaatataaatgtgcccctaatggttttgacttttgcttaagtttttgagtcctcatgtatgttaggtagtgccatctagtagccagaaatttgggaactggctgggcatgatggctaatacctgtaatcccagcactttgggaggcttaggtgggtggatcacttgaggtcaggagttccagaccagcctggccaacatggtgaaaccacatctctactaaaatataaaaaaatagccaggtatgatggcccatgcctgtaatccgagctaattgggaggctgagatgggaggactgcttgaacctgggaggtggaggctgctgtgagccaagattgtgccactgcactccagcctgggcaacagagtgagaccctgtgtcacaaaaacaagaaacaaaacaaaacaaaagacaagaaacctgagaagcgcagtagattcaattatatatatctacttttaatttgctagctctgtgaccttaggaaagttacataacctctctgaactgcaactgtttcatttacaaaatggagataatgatagtttttctctaattggtttgttgtgagataattcatataaagctgatggtgccagattacactcaaaaaaagcattcagctgtcattatcattatgacttcttttgttaatgttatagcctttccttctctagggaaaaggaggccagagtggacctaggctgactgagagaattcagctcagtcttttgaattattttgaggtagaggaatgattgatatagtatagattattaaattaggacttcacttttggagaaaagttcagatatcattgttgtcttatttttcttcactttcccacatttttgcagccatagctccatccatttggttaagaacttagaagctcacaaactcgggtcaaagacaggtcgaaatcctcaaatcccttaagaacttcagcttattcaggaagggatatttacagaaaactagcaattgtataagtctccaaaaaagcatacattacttgaggatccatatatttttggcatcctcagggttgctgtgatgatttatagaaggtttgtttatttaatttactttatttcaaataggttttaatttttgtacccttaagaaaagattcgtactcttccctggcagattaaagaaaatgagcgtatattccctaaccttggccagttactttcctgggtttgagggtttctgtgaacgtctaacttacctctgtgacctgtttctgcaaccaggggtgttgcaatggatgcttttgtcttgaggatgggacctttcaagaaacagattcactgaggtgcagtgggaaggtcagagaaagatcttcgtatcgcctattattatttgctcgtctattttttctcctttcttaaggccactaactgattctcctttgctaaggctgcctacttccactgagaccttgaaccacatgaaattgttgttgtctgtgtttctggtcaaatagtggcaattttgtatgattcaatcttgtcatttaattttttgggaggttattattctatttcataccttttttatacccatcttctttacttcatttacctgtccctcatacttgacttgtagcttgtcccttcactgtcatcgtctggccatgtgggtgtgtacgtgtgtgcgagagagagaatgtgtgagaatgtatgtttctttatgcattgggatttagggtttttcttgcaattgtgatttctctgggcacttttgttaatatagctagtcagcgagtgctctagataattttccttgcctccccctctttgaaagaaaagagggtgttcttagatgtattcttatcagataagccagtagctcaggtgctggtctggctttggtgtcattggggtctgaggttgctgacttttaccttctctgctgaaaaattaccttcagcagaaacgtctgaattgcaaggagaaggagaaaaaaacaggccaaacacagtccttggtactccttgggagccactgagaagagtccaggttcaaatggtcagaaggttattttaatgattgtgtctggcctaaagtaccattagcttccagtggagtttagaatgtggatggatcctgaaaggtattccccagaggtttggattaataggcacaagggaaccctaaaggactctattggcctgatactccccatatccacgtagaagagctttagaagaaccttctgttctgagaccctggctgggcccacccagagctggcccattcaactcttactcctttgccaccactaatggttcttctactagtttttatattatttaacaaaaaggcactttaaaaatgcactcctggcaatctatactggaatatgaaaaacatgctgcaaaaccttgacactccaagtgtggtcttacagttcccagaatcccctccttgaggagctgctagaaatgctgaatctcaagcatctccccagacctactgaatcagagcctgcatctgaagctttacggtgtacaagctgttttatgtgaaggctgaagtttgaaaagcactgcattaaagcgttagtttggtataaactgccctgactgaacttggtgtgtccacttagcttgcatgatgactgttgctttgatgatgaaggcttacacgggtagatcctttgagtgagtgatctgacatgattctcctttgctaaggcatctagattcagtgcacaacttacagctgtttgtctttaggggaaatacaactgtaaaattaataaaaacatagtctcttcttatgataacatggaacgatggcaaaatagattttgttagcacttgggtaggaattctgaatgaagcaggcaaattctgttggcagtgaaatgataggatgtggtaaagttagaataaaataaacttaaatgtctcaaactctcatggtatatactaccagtttaataataatgttgtacctttgatgatttgcagactacaagcattcaaggtgctgtgttatatattacttgcttggagaataatacttcttaaaaattgaaattcagaaattttaaatcagacaaagcttttgtgcatggcccacttaaatggctattttgaaataatgatagtggatatagaaggattattctgtaataggatgagactgttccttttgtcatggagatcataatcatatttttgtaaatttttattatttttttggttttgtgtccatcctgcacactattactgggtaggtacatggttttttaacatggtttatctttcaaaactataaaggcattgcaaacagaagacaggtcatttatttttcttccaaaagcatctaaaatgagattttgatatttgaggtcataaagaggtgagagaacagacaacagttgggaaagctatttctcttgaaattgtttggccttaattactacagtgtcctagtaccacccatacgtttccaaagaagtagatccctgtaaatgcctttgtctctggacttttgagtaaaatagtagggtgtgctttgcaaaatgtcatcgttgatgttgagtttcagagtctttaattaggaagctgaaatctgtatatcgagatttgtaaatcatctaaattgcagagtaatgttttagaatactgcttaagggattggcattaaagccttttttaaaaaagaaatgcaataatttcctcaaatcctcactcattagacctctactaactatagtgctgacttttttttttttttaccctaaagtctggaattccaaagaaatgcttcaccatttcccccattattatagccacctggaagcagtattcatgtattagatcaaaaacacaacaaagaattatgaaaggttgtttcctggtatgcaatgcatgatgacatgaacttacagaacagagagaagggaggctccatgtttatttaaagaggaaatttttattttctggttacctacttttacatgggttacatcaaatcccacgatgaggtttaaaaattctcatagataatcaaacgtcattacttggcttactgaaattcagacttttcttttttcttccctgtttttctctatcaaattagaatctttggaagaactaccagaaacgagtgggaaaacaacccggagattcttctttaatttaagttctatccccacggaggagtttatcacctcagcagagcttcaggttttccgagaacagatgcaagatgctttaggaaacaatagcagtttccatcaccgaattaatatttatgaaatcataaaacctgcaacagccaactcgaaattccccgtgaccagacttttggacaccaggttggtgaatcagaatgcaagcaggtgggaaagttttgatgtcacccccgctgtgatgcggtggactgcacagggacacgccaaccatggattcgtggtggaagtggcccacttggaggagaaacaaggtgtctccaagagacatgttaggataagcaggtctttgcaccaagatgaacacagctggtcacagataaggccattgctagtaacttttggccatgatggaaaagggcatcctctccacaaaagagaaaaacgtcaagccaaacacaaacagcggaaacgccttaagtccagctgtaagagacaccctttgtacgtggacttcagtgacgtggggtggaatgactggattgtggctcccccggggtatcacgccttttactgccacggagaatgcccttttcctctggctgatcatctgaactccactaatcatgccattgttcagacgttggtcaactctgttaactctaagattcctaaggcatgctgtgtcccgacagaactcagtgctatctcgatgctgtaccttgacgagaatgaaaaggttgtattaaagaactatcaggacatggttgtggagggttgtgggtgtcgctagtacagcaaaattaaatacataaatatatatatatatatatattttagaaaaaagaaaaaaacaaacaaacaaaaaaaccccaccccagttgacactttaatatttcccaatgaagactttatttatggaatggaatggaaaaaaaaacagctattttgaaaatatatttatatctacgaaaagaagttgggaaaacaaatattttaatcagagaattattccttaaagatttaaaatgtatttagttgtacattttatatgggttcaaccccagcacatgaagtataatggtcagatttattttgtatttatttactattataaccactttttaggaaaaaaatagctaatttgtatttatatgtaatcaaaagaagtatcgggtttgtacataattttccaaaaattgtagttgttttcagttgtgtgtatttaagatgaaaagtctacatggaaggttactctggcaaagtgcttagcacgtttgcttttttgcagtgctactgttgagttcacaagttcaagtccagaaaaaaaaagtggataatccactctgctgactttcaagattattatattattcaattctcaggaatgttgcagagtgattgtccaatccatgagaatttacatccttattaggtggaatatttggataagaaccagacattgctgatctattatagaaactctcctcctgccccttaatttacagaaagaataaagcaggatccatagaaataattaggaaaacgatgaacctgcaggaaagtgaatgatggtttgttgttcttctttcctaaattagtgatcccttcaaaggggctgatctggccaaagtattcaataaaacgtaagatttcttcattattgatattgtggtcatatatatttaaaattgatatctcgtggccctcatcaagggttggaaatttatttgtgttttacctttacctcatctgagagctctttattctccaaagaacccagttttctaactttttgcccaacacgcagcaaaattatgcacatcgtgttttctgcccaccctctgttctctgacctatcagcttgcttttctttccaaggttgtgtgtttgaacacatttctccaaatgttaaacctatttcagataataaatatcaaatctctggcatttcattctataaagtccaacctgtaagagaaaatggtgcatttgtatagcgcttacaatgatgaccttgtgtttgcatttttgtttctgaagttatatattttagagggggtgggggaaaggtaatgaatggctggaaaattgcaggcaagttatttgataagtcatatttgcactaaaggtgttaccagtgatttagtatttttcaaatgaacttctttggggcagaaagatttaagggaaaactaaagcctacaaaacaagcaaaacctggataacccgagataaagtttcagagataatagcccatgcaacagaggcaacggtgccagaaaattagaaagggaaagtgtcggagatcagcttctataagaacatctgccagttggactgacgcccaaacagaatgaagtcaaattaggctgctcagattgaacacttaccagagtgtcagggcttctgtaccctgggttagaatcagaccaaggaagggttcagcagatgttcataagagcagggcacccacaactacccactattttactggcagtattttaggtcagtttccaggactttgcatcccctctgatcctgccatgcatgattggtgaaacctacctctaatctccttgga

SEQ ID NO: 17 - DNA, 177389 bp, Homo sapiens
ttggtgccttcccagcgaccttatttcacgccagctgactggcgttcaccgcagtgtgagtgtcggccggaggaggggtccacgcgaaagagcccgcgagagtggggatatccggccccgaaggccggagcgggcgtccagggcgccgatggccgcagcgcccggcagccgtgtccacgctcccctccgccgcgttccatcgcgtgctacctacggcgtctgcgggaagctacccgggcggcagctgtggggctggcttgtggggaggggccggcgggcccgcgcggaggagcagccccgactcccgcccgcaccagcagctcggcgcccccttgccggcggctggccctcctccccggcaactgggcgccgggctccgcgaactcttcgggcgcttccgccgtgcgctcggctcttttcgtgtccggggcggggcggggcaggcgcccgtggtcgggtgcgcgcggcgcgggcgggggccttcccagtgcgcgcgcgccgtgcaaggcccgcggacgcccgcccctcccccaggcccccgcacccgcgccgccccctcccctcctggcaagagtcggcggcggtggcggcggccgctgcagagattggaatccgcctgccgggcttggcgaaggagaagggaggaggcaggagcgaggagggaggagggccaagggcgggcaggaaggcttaggctcggcgcgtccgtccgcgcgcggcgaagatcgcacggcccgatcgaggggcgaccgggtcggggccgctgcacgccaagggcgaaggccgattcgggccccacttcgccccggcggctcgccgcgcccacccgctccgcgccgagggctggaggatgcgttccctggggtccgggtgagttgggagtgcgcgtgcggaccggaggggctggccgcagcggggaggccagaggggctcgggcgaggctgcagaggcagctgggcgcgcggtggccggagccaggggctgcccggcccggccccggcagctccgcaggcctcggcgcgcgctgggccgggaccgcccagccagagacccacggcaccccgcgccgcgtcccccgccggcccctcttttgtctcccactcgcgggttgcaggccgagtttggggatgcggagtgggcgaaagtcgctccggggacgcttctggaatccttaaatgggaaaggcgctcacctccccgccccggagcggcgaggctgatatttgtgatttggctccggacgctgtggggaggaacaggggagaacaaaatgagtttcgggcgggggtcgagtgagaggagcagccggcccgcccccgagtccccgcgggaaggggccctggcccccgagctcccggagctgcttcacctgttgtcctgcgcggcctccgctccgtggcctggtgattccgtacttcagttttggaaaactttctgctggattgcctggacccttttttctctttccagactcctagtggaaagatttggcaaggaaaaaaaaatgagcttgcgtcagggaagaaaaataatatgctgtgtgttagggtctggcgtttgagcgtggtactctttcatgctctcagatgttttaatttggtcaaactcctgcaggttttctcttttaagcggttaacaaactgttcagagtacatagtatgaacttggcacctgtgttacgtcatttaatccttacaacgattctggtttattgtattcctcattgttttaggggaagaaaccgagtcgcaaagaggttaactaacttgtctaagggagctgggatttgaacccaggaacatcgtattctggcaaacgaattaggaagaaaaaaaaccaaaactgtttgcaaacacttttacgtttaggaacatttttcagttactcttacttgaaattatcgctattttgttgctggagttgaaaacaactactttattgtatttacttgtgagaggagttaaactttgaattagagtgtaacttaatgcgtctcattgttttcagttgttgaaataaagaatgtgaaccagaattatttagatttttaaatttgaagctaaaatatgggcaattctctgatctaggaatggggtgagtgtatgaaaggccgattgaaatgtagaatgcgtttttagtagaaccagactcagttcttgtttaatttttcctccattttccgtggagcccactttaaactttttctactttcttcacttctccccaccctttacagaagaggttgaggcacttagcaggagctccttcattaaattccttctgttactggcttcttaaccttccgtcaaagagggagaatttttttttttttttttgtctttcttattagttaacaccttggggtttttttcctttccttctaattttcctgcttagtggagcgtgagttattttctctgtcgtatttgggttctttaaagtacaaatgttcttaagattttttcagtttacaaaaaccttttcttaagtctgctactccttcaagctgtcttgttgctgcttttccttttcaaatcttattaacattttaaaaagcttgttcgtaataaaagtaacacatggttgttaattgcgaactagcgcaacattgaaattaaaatttagtcattcacaatccatctctagagattgccaagtgtagtctgcttttcctgcctttgcctggttggtggctagccactcatttcttaaccccttgttatctggatttcaccttcacaaggaactataacctaatcaacacatttaactacctttttctaagtcctctccttgagttttctgtaagatttaacatcgacttcacattttcagatgcctctccttgggtttcattcatctatactcgctgtattctaacacagggtccaaggcagtaagatacaacagatccttccctcatggagcttaaagtctagtggggaaatacttattgaaaaataaagtctctagttaaatataattgtgattttaattaaggtgcagaatattataagaacttcaaatggagacctgatctggtgcttgtggtggtgggagaatctgggaaagataccttaaaattgctttgttggaacccaggcagattgtgaaggatgagcaagagttaactattaactagatgaagaggggccttttgtgacattatactgactttgttcctctccgccacttttctgccttctgtttcttctttcctctttaatatgcgttctccaagtttcacttttcagatcacttttctctatgtctctagtcccttagaatgattgttcagacctttctgttggaataattctcaattctttgtttatgtgtcttctgaatcacgtttttttgtttgtttgttttgttttttcttttttattcagttgctttctacatatctgtacctgattgttctgagctgcttttccttagcaaacttgcctctttggtgttctttatttttgttgatgtcataccaaacccaaaccttttcccatttcatcatatcttgtctgtagccaacatctgttgattctgctttatgatattgtaactcttctgctctctattcttgctaactgtggggcaattctgaattcatattggtgtgaaggtagtagtcaaatcataaaacgagttgggcagctttccttctttttctctttttcaggatcattttagactgggattatctgttccttgaaagtttggaagacctcccctatgtgaccatttaggcctagatcttttttctggagaggactttgagtaacacttcaatttctttaatagctgttggtttgtgtcgattttctgattctcatatgaattttaatgtttcacatttttttcaggaatttattttcaaatctagtgttatttggctttcacgtagttctccccccaccaccccgcgactccacccccaccccctaactctaaatcaagttctcatcccacctggactaatgttatgattttcttgccttcacttttctcctttatctaatcttatgtatttctgcctaaattaatctgtaagcccagttcttaccacttcgccactcagaagtttcctaggtcttccattaaatgaaatattttctgtggtatttgcctcagatttacctgtttttttttttttttttttttaataccttattgttttttctttctttctttctttctttctttttttttttttttttttttttgatacagagtctcgcactgtcgcctgggctggagtgcaatggcgtgagctcagctcattgcaacctctgcctcctgggttcaagggattctcctgcctcagcctcccaggtagctgggaccacgcctggctaatttttgtatttttagtagaggtggggttttgccatgttggccaggctggtcttaaactcctgacctcagttgatccgctcgcctcagcctccctgtgctggggttacacaggtgaggcactgtggctggcctttatagcagtttttatacaaatattagtttcactactagtttgcagggtgggtctgtaacggacttttcttgcatattaaaaggaataaatggggaaaggctcctgtctagcctaacagtagctgttgaactgtcctgatctgactattggatcttaggagcagcgaaccatggagagaaaggaaaatgggtttcctatcacactaaattttgaagtaggaaccatttcttttccttttctactttcccaccttttactagtttttaggctttaggatgtctttttaacatcacaaggtccatattgaccaagttggaccaactttttaacacaagattaaatgttgacttgcattgagttatgtccattgtaagatacacagtagtgttacagaccacttaaaatatgcttctagttgtaagaagccattgattgtaaggtgcaccccaattccggagatgctaaaatatgaaaaatggatgcatcttagaattgatgaatagtgtttctctccctaatcaaagctcttggatgtgcctggaaatccccagtagtgttttttgaaaagaacactagttaggggcatagggagatcagatgatcagtagactccatctcagggtggcccctgtggtccctaagccagttcgtatgggcagtttaatatataactaatgagtagacattgaatagatgagtaaattatctttgagtatcttttatttactctgatgttgtagactttgttactcttttatagttttatatttctgatgagccttcctttcttatggcacagatttgttatactgttaaagtctggaacagtggagcttggctcttgatccagctgtatataattggctgttgacttatgaaggaggacaggagtatgctagagatagggataaaatattataatcacatttgcagttagggagattagttacatgttggaaaatcattttgaagaaaggaagactgaagatgttcaaacttgtaggaaggtctttctggcctagcccggattaaacccatttatgcctagtgttccactattggaacgctaagcacgtgggagttatttatatcctgctcaaggtcatcaccaaggtctgattgcaaaaattcaaaaaattgcagcctcaggcataaatgggttaagatggtggcagataattagggcctggaatggataggaggcgataactagcgtggatgagagaaggaatgggattggcaagaacaactcctggatttctagcttggaaagcagggtagatgtgggtgacagatatgaaaaatgaggtgggagagctggtttgtagaagaaaatagtattggatcacatggagtttgagatatctgaaacagccaagtagggatttccacttggcagttgtctatatgggtctggggtttgacagaggtttgtgctggaggtaggcatttgggagtcattgctgtatagattttatattccaacagtgggaattgggtggctctctcaagtgactcttgcttacaagtgacagccctaactcaagttagcttaaaggagggaaaagcttctccccactaacccccatgatattgaaaggtctagaaatagacatggctggacctaagtgctcaaatgatataattaattgaggttgtcttttctgttcttcacttttgtggtctcatttcaggcaggtgcatatatctggcagaggaagacataggttataggttatagaattacaggttataggttatagacctcgtatcgagaactccttgtatggtctagcaaagagcctaaaacagcattgagaattttttttctttctttttgagacggagtcttgctatgtttcccaggctggagtgcagtggtgcgatctgggctcactgcaacctccgcctcctgggttcaagtgattatcctggctcagcttcccgagtagctgggtttaacaggcgcccgccaatacgcctggctcctttttgtatttttagtagagacagggttttgcctcgtgggccaggctggtctcaactcctgacctcaggtgatccttccgccttggcctcccaaagttctgggattacaggtgtgagccactgcgcctggccagtcttgagaaatttcaacttaaggcctgggtagagaagatagacattaaataattatctagttgtagttatgttaagatctacaaaaaggaagtccagggaatgttacaagactgataagggaagctgggctgttcaggatgcgggtactttggaaggctttcctgagaaaggtagcccgcagagtgagaccttaggcaagaaaggacaaggagactgtttttggaagtattcagtagtatttatttatttatttgagacggagtctcactctgtcgcccaggctggagtgcagtggcgtgatcttggctcactgcaacctctacctcccgggttaagcgattctcatgcctcagcctcccaagtagttggggtcacaagcgtgagccaccacgcctggctaatttttgtatttttagtagagacggggtttcgctgtgttggtcaggctgatctcgaactcctgacctcgtgatccgcccacctcggcctcccaaagtgctgggattacaggcatgagccactgcgcccggccagaagtattcggtaaagtgagcagtttttgcagctttttaaaaattttaaaggcaatacatctattgtgggtaatttgggaagtataaaaagccataaagaagcagcggaatgattaagtttcagcttctaattttttataaataatgtctgatactggttttactactgagtacctattcaatcacggatgccacactaacccaatccgaatcttcgtttctttatcttaaaaaatagaaggaacatggtgaactttaagataatttttctgcttaaaaaaagaaaaagaaagaaaatatcttgacttgcagcacagttagctgccgaaattgaaggtcatataatgcttttggtcctaatgacatcactggacttctgacttttggctgaagaatcacgccagccttggcagtccttgcaagtaccaaagggagtatggcttatgcctgcggtgcccttcccgtatcctgctttcttacctccttttttgagcattaatttttttttctttagcctttgggtaaagtatcaaaatgttgagaagatagactctcaattttgaaggtgagaaatctgtaggagacttggatagttgtttttttttttttttttttgagacggagtctcgctctgtcgcccaggctggagtgcagtggcgcatgttggctcactgcaagctctgcctcccgggttcacgccattctcctgcctcagcctcctgagtagctgggaccacaggagcccgccaccacgcctagctaattttttctattttttagtagagacagggtttcaccgtgttagccaggatggtctcaatctcctgacctcgtgatcctcccgcctcagcctcccaaagtgctgggattacaggcgtgagccaccacatctggctgacttggatagttttgatactgttttatgtatattaagatttgtaggtagttttcttactagtaattaaaatgctttgtaatgtatttcaagagtatagggtcttgagtgttttaaatttgtatataagaatgttttagattcctggctaaaagaagctcttgttagaaaatattaaagtaaaggctgttaaattttggtgaggctcttaatgtctgcatttttcaagaatcatttaaaaatgtcatgaaataaaaatatttcagtggtaactgttcagaagtatcttaaatgtataccaaatcaatgaaatataatcgctgggtgacagattattcttccttcattttataatcttttatttaataaaaatgtgggggaaaaattgcatgttgaagttgtacgtgtatattttagcaaaaactgttaatctttctgaagtactgctttggtcatcatccctatttgttaaatatttttccctgttttcttatttgcttacaatagaaaatccagaatatcttggactggtctcctgctctggccaagtcagccttttctgctttgcttcctttcctactattttatcagcctaagtcacgtaaatatccgattcaggtttgggttcagaatccttagacctctactgtccactacaatagatagccactaccacatgtggctgttgaagacttgaactgtggctagtctaagtgtgaattacgtaccagattttgaagatagtaccaaaagatgtaaaatatctcattatgcttttaaaatattggttatatagtgagatgatactgttagggatacattggattaaagaaatatattaaaactgattttggccgggcatggtggctcatgcctgtaatcccagcactgtgggaggattgcttgagcccagcagcttgagaccagcctgggtaacgtggtgagaccttgtctcagttaaaaaaacaaaactgatttcacaggattctttttactttttaaatgtggcaactagaaagtttaaaattacacgtcatattggacagtactgcctttgactttcctttccctggttctttgcccatcagaatgctttaaaatctagtataaatccttggccaggtgctgtggctcacgcctgtaatcccagcactttgggaggccgaggcgggaggatcacgaggtcaggaactcgagaccagcctgaccaacatggtgaaaccccatctccactaaaaatacaaaaattagccgggtgtggtggcacgcctgtaatcccaggtactcaggaggctaagacaggagaatcacttgaacctgggaggtggaggttgcagtgagccgagattgcaccattgcactccagcctgggcgacagagtaagactctgtctcaaaaaaaaaaaaaaaaaaaaaagaatattcctctctctcctatgaagccctcctcagtggtccaagcctcatagttggctctttgctgcatcattatttgaagataatcttttggtatattagatttctttactacaaaccttctcagaacttttaatatgctaatacacatggtgaaactctagtatagtttccctaactacgtattaccatagaactgtgtgttttctgttaacagaagttacacatatttgtggttgaaatttcaaacaatacagaaatgaagtaatgaaagtcttctgtaatcatgcttcacctgtgccccaagattgccactgttgaaagtatagagctagaaaaaattttcttttctgttgccttctttctttttttctgtccccatttcctaaaatggggtcatacgatacatccttatctttaaatttattttcactgaatatatagggggattctttttatgtcagtaaatttcaatttcctcattcttttttttttttttgagggaaggtcttgttctgttgcccaggctgcagtggtgctgtggtgcaaacagctcactgcagcatccaactcctgggctcaagcaatcctcccatctcagcctcctgaatagctgggaccagaggtgcatgctaccatgcccagctaattaaaaaatttttgtgtgtgtggaggtgggatctcaccatgatgcctaggctggtctcgaactcctgggctaaagtgatcctcccacctaggcctcccaaagtgctgagattacaggtgtgaggtgttgtgcgcagccttaatcatctcattctttatagtagttaagcagttattccattttctgattataccttaattttacttaccagtttcgtgttaatgaataattagattatttccatttttttcttttgcattgcaaatatgctgtggtgtttgtacatatcctttgagactgtttttattttatgaaatgaattcttagaaatgcatttactataagagaagccgtgcagattggatggaaagtgccaagccaccctgcaaaatcttcgtaaccattcatattccagccaacagtatttgaatatgttctctcctcccaacataatcatatcagtcttttttttttttttttgagacggagtctcgctctttcacccaggcgggagtgcagtggcgctatctctgctcacagcaagctccgcctcctgggttcatgccattctcctgcctcagcctcccgagtacaggcgcccgccatcacacctggctaatttttttttgtatttttagtggagacggggtttcaccgtgttagccaggatggttttttttttttttttggagaccgagtcttgctctgctgccaggctggagtgcagtggtgccatcctggctcactgcagcctctgcctcccggattcaagtgattctcctgactcagcctccggagtagctcagacaacaggtgcacgtcaccatgtccagctaatttttgtatttttagtagagacagggtttcaccatgttggtcaggatggtcttgatctcgtgacctcgtgatccgcccgccttggcctcccaaagtgctgggattacaggcgtgaggcaccacgcccggccatatcagtctgtttttatctttgccagtttgccagctgaaaaaacattcatgatataaggtttctttgctgttgtatgaatattaaaaaacaaaaaattttaagtttcatttgtcttatactctcaacttgttatacgctcctttgatttttgtgctaaaatatttcgtattgctaacagtacacatgcatgctttgtacaaagtaaatgttcagatatttgtatctgttcatggcaaaggcgtccagaatatgctactgcaacataaaaattatttggaaacctggtggctcatgcttgtaatcccagcactttgggtggcggaggcaggaggatcacttgagcctaggagctctagaccagcctgggcaatatgttgagactctgtctctacaaaaatttaaaaatcaatgagatgtggtggtatgcacttgtagtctcagcaactcaggaagctgaggtggggggatcgcttgagcccaggagttcgagactgcagtgagccatgatcttacactgcactccagcctgagtgacaaagcaagaccctgtctcaaacaaacaaaacatatattttaatctggaaacatttgagaatagcttttttttcctcctgaactcccttgtctgcctaaaactagatcctcccccaaagaactcaattgtcataacttccagttgtcataaatcccttccttgggagttttgcaagcagggaagatggtctcttgtcgctggagagaatttggcaccacacctaaacagacattgttataaactatcctatgtccaactgttgtcctaagggtccatttgtctttcctacatgttacttgttttcctgcaacagcccattgttcttttctagttccagttcccctagtaagatggtacacatgccccaaattcggacagcccccttgggtcacatttttctgtgaattattctacatatgtgaatcaaatctgtcatttctcttgcagatgtgttctttgtcagtttaatttatcagacctcaattactgaacctaagagggtgtaggaagtttttcttctctgacaatggccaaattgatatttttctggctgtaagggcaagggataataataaagtaacgtttttctaagaataaatataaatatcttaaatataaagagcgtgagtaaagtttctttaaagtacattaaaaaaactgttatccaaaatgaaacatttgttaaaagaagtggattatgctattaaagatgtgccccccacccccatgtgtttgttcctatcgtagtaatgctgattgttaatggatggcatagtaactttaattgtgttcacaggcctttgttcttaaaattatgcactcttccctgttttttcttagcattttatcaatttgcatagaagagaaaatgatttgtaacaggtttctctggtcacatcactgaggagagtcaacaaaagaagtcattcaattgaggttaaatctttacacaaagaaggcattaatagcttaaaagaataaagaaatcctgatatggttattgtgacttttccatttatctggttatgaaataactaaaaaggttaattaaatgttggcttatttctaggtttagttatgcatcggtgtgtttattgctttctgtgccttattacactctgcttactaggtttgtgaccttgagccaaagttgttaattactctaagccttcttttctcatatgtgaaacaaggataataatggtcctctctctcagggctactgtgaggactaaatgaatgatgagtgcagttcagtgcttaacactgtgcttgccactgtagtagcttaatgaatgttagtgaagatgagtatttctgagagaaataagcaggacagttctatcttaaaatgcaggtttgaatggcttcacatacagggtccttgaaaattaaatctgatcttgttgctttctaaaagtatgcattattttagcttccatgttaatattcacatttgaatttgcaaaatgcttctgtgtatcatcagtactggcaaattgatataggaaattttgttgcttttcctgctttgtacatcaagaattggaggctaatgaaggttaattttcccaccaatgtcaaacaagttggtgtaaaagagtaaatagatctagagctgaactctgtagttctacctactagggaggctgaggtgagaggatcacttgaggccaggattttgcagctgtaatgcattatgagaataatgtgctatgtaaatagcaactgcgcttcagcgtggacaacatagcgagaccctgtctctaaaaagaaaaaagtaaatagaatcagacttttcctcattcactcagagtggatgattaggacctcaaagttacatataaagtaaagtcaaagactccacatgctaaagaaagccctaggcattagtggccagaatcctttccagggcttattaagatgtggcagaattaggtcacaagttggggggagaaggaattgtgccagaattgtcattgcagctattagtttgcctagcagggagcactgtagtttttcttcccttctccttcccttggagtgtccttcccttagaaacttagtgtggagaggtctaagagaaccattcctggaggttaagaatactagcagaagatggaatggagtatctgattacctaggcagtattaattacgcagcaggctggtttatctgtacctatttgagcaaaggataaggaaaattagaaatcccagtgtggatggaggggtggcagtgaccttcttttagttcaggtgggtaatgcagatgtaaccaggcaccagccttcttgccaggcaggctgtgctggacaggggagcaaaagtagttggaagagggtgagctgaggctgggcaaggtgatgcagacctataatcgcagtactttgggaggccgaggtgggaggatcattgagctcaggagttcgagatcagcctgggcaacatggcgaaaccccgtctctacaaaaagtataaaaattagctaggcgtggtggcgggcgcctgtggtcccagctgctcaggaggctgaggtggcagattggcttgagcccaggaggttgaggctacagtgagctgagatcgtgctactgcacatcagcctaagtgacagtgaggccctgtgtcatattcccagcttcttgggcaactgaggcaggaggactgcctgagcccagaaggttgaggctgcagtgagctatgatcttatcactgcacttcagtctgcgagagagagaccctgtctcaaaaccaaacaaaacaatacaacaaatggagggtgagctgaagcagatcttcaggtgggctgagagcctctagtctcctttgtcatgaaagaaccccacttgtccccagaagaaaagctatcatttgtctgcttgtgatacagacagtgtagtcagtattagccaggaaagtggcaactgagatagctactccagtctctctcctccctcccctattcatcagaccacaccccttcctccaggctagctctcttggactgggtgcacccaatctgaatttgaagagaaaggaggtgattgtaagactgaagattaacgttttaaactgtactttttaataaccaaaagctataggaacttttcaagatctccataagaagtggaaaagggagatttgaccaaccacaattagggatagggatagagaaacaattgtttcttgtgtttgtaccgatttcagaccctttgttaagagccttaagttcccattaccttaagttcccattaaggcctttggacacattaagttcccattaagttcccaccaaggcctttggacaccaaatcccattctctttttctccgtatgaggctgtcacagtactatagatgaccatttgatcttctcagtggcctgtttccaaatgcattctgattctcaatactattttagcattaagtgtatcatttaattttatctcagatttataagctgtatattatatgataacccttttaattggaatattaattcaaatatcttaattcctttttatggaattgttggagtttatcaaaccttggaaacgttaaataacataaaaagcactcaaaaagaaacactaattcaatattttatttttacttagtgtttgagattttgaattttagaaagttttaaattaatattcagctgttattcacatataaaaggtaagtaggttttagtttaaagaatgttgagcaataaaatataagattgagatggattaaatggtatctgacatatttccttactctgaatcgatttaacctttacaagtattctatgatatagttactattatcagttcccttttacatgaggaaactaaggctgcagaggttaagtagcttgtcaagggttgcatagttcctaagtggcagagctgggattcaaacccaggcagtctggattttagagtccatgctcttaaccacataattatattgtcaaatggaggaggagaattttaagatgaggatgtgtactaggcacagagttgacttttaacaattaacctctcttttaatatttaaaacgtggtagagattttccacatttaaattttccacagttaatctttgagattgattgattgattgattgaagcagggtctcacgcattccattccccaggcaggagtgcagtggtgtgaacatggctcactgtagcctcggctgcctgggctcaagcttagatcctcccgccttgacctcccaaagtgctgggattacagctgtgagccactgtgcctggctccaatttatacttttttactttactgattttgtttttcctttgcatcttaaacaatattaaaaggtcagtggcatatagttgtttaaaaaaatatttatccaaaattcttcccacataccttctttaaaaattagtgcttttttttttctcatctctgagatgtatacatgtttaattggcgatggtcagagataggttttttttttttttttttttttgagacagagtctttctctgtcgcccaggctggagtacagtggcacgatcttggctcagtgcaagctccacctcccgggttcacgccattctcctgcctcagcctcctgagtagctgggactacaggcgtcctccaccatgcccggctaatgttttgtatttttagtagagacggggtttcaccgtgttagccaggatggtctcgatctcctgacctcatgatctccccaccttggtctcccaaagtgctgggattacaggcgtgagccaccgcgcccggccagagatagatcttttttcacagctttaccatgagtattactcttaaaataaatgaccttgggtaggtgcttgcataacataattatgttatttgtatcgtttcatagaataaattaaaacctaccctgtgagagaacaagaagaaaaagagagtcagttgaaaatgaaagtgattaagtccatctgtggggcagtttttggagtcagattgagaaatgaaatctgatttttacctgttaatgctgctgaataataataatatggaatattattaaattgcttttgttctcttaacagtcatttaaatgtaattggttatggcatgtagacgtctaaaaatcatcccattcctttaaagtttcttttcaaaacaagtcttttttccctcctgattgcaaaaataatgcttacagaacaaattgaaacacatagaaaagccctgagaagaaagtaaaaatcccctgtatttatactactcaaaggtaacatctataaacattttggtatatatactgtaagtttaaaaaattctacaatgtttctactgtaatttaagaatttgtgcaaataagttgagtaaagctaagttcatcctgagcgtctgaacctggaatataaggaacttgaaatttgtaggggtgggggtatctgaatagaaatagaaagttctgaaaatttggctgtcttattctagttatcttttttttttttttttcctgaatgttcttcctttccttctcagcttttgccacttttaagtttttttttttaatcaagatgtttcacatttgatatgttcttcagtaataatagactaaaatataataagatgtagggaagcagaacctaaactgtaggaggttaaaaaccagatgaaggccaggtgtggtggctcacgcctgtgatcccagcactttgggaggctgaggcgggtggatcacctgaggtcaggagtttgagactagcctagctaacatatagtggaaccctgtctctactaaaaaagtacaaaaattagctgggcatggtggcgggcacctgtaatcccagctacttgggaagctgaggcaagagaatcacttgaacccgggaggtggaggttgcagtgagccgagatcacgccactgcattgcactccagcaacagagcaagactccgtctcagaaagaaaaaaaaaaaaaaaaaaaacacaacaccagatggaaatagaaaatctaaaacctctagcagaatgaagctagaaagaatggaatctaaacactgaaattatacatctgctaggcagctgtgcgttctttatttataggttctgttgtggaaatagcaaaagaaactttgaaagaaaaagatatcttaaatagactaagcatatattcttatcactgtgatatgcacatttttagctgtacagcatgtatttcattctttttttttttttttgagacagagtcttactctgtcgccaggctggagtgaagtggtgcgatctcggctcactgcaacctgtgcctcctgggttcaagcgattctcctgcctcagcctcctgagtagctagaattacaggcgtctgccactacacctggctaatttttgtatttttagtagagacagggtttcaccataatggccaggctggtctcaaactcctgacctcagatgatcgcccgcctcggcctccgaaagtgctgggattacaagcgtgagccaccgcgcccagcctttaattcatctttaaatgaattgtccccattttctaggagttattatcttttctaaaaataacataacttttttggattaaatttagatatcctatttatatcttcagcattgaatcaatattttattaaatatacattaagggagcttcagtgatactaaaagagtgtgatgctgttgtaaatttgccattgctttcctttttgtcaatattcaaggattgtcttggaccatgggccaagcctgaattgtaagaaggaatggtaaagcatggtaacccattaaagggtaaagaaattaaaaaaaaaaaattgtcagagatatactctttaaagggccagattttttttataagactttaaaaagaattgatgattcttattttacacaaagatttttagaggaaagaaaaagtatgcaaaagagaagatgctctttgaagctggccataaccctgctgcaagcaaaatcagacaaggatggaccagaaaaagagaacaatttctattctcacttatcgtgtatttgtaaaatcccaagtaaaacacgagcaaattgaatcaaacagtatattgatactatcggataaagctagcccaagattcaaggatgatttgaccttagggattatattagtgtcatttacactaaataaatctaaggaggaaaacaatacaaccatctcagttaatggtaaaaaatatattaaatgaaattaagtaactctttgtgatagactagttttaagaaaagaaagaaccttcctcaacctgataaagggtaattttctacctggggcgtgtagcaaacccaacgggtaaaatacttcccgtgaaaggaagaacaatactaagttcatttttagtgttctttttagtgctggagaccccagccaatggactaagagaagctgaagcgaaaaagttgtaaatatttgaagggaaggtcagaatgtgtactgtttgtttatgctctttgctaagcatgtaatctacctagaaaagccaagaaaatcgattgacaaactgagaaaactaataaatgagttcagtaagttggctctacacgtggtaaacgaggaaatccatacataggttcctgtacaccagcaatagccgtgtgagaagtactgtcactgtctgttacatctgataaaacctgcctattaatctttggcctgcttgtcagtttcttgtcccagacatgctttgagtcatgaggagagcactccaggagatgaggctttcagtttcctgcttatctcaacacgaaagtcaaatgttgtgaagggtggacacaaggctgatggtttcatgacagccccagagagcaaaattcattccccctgatgcccatctcaccctgctatagaaagtttcattttttggacagcatttcctgagagaatgtatcactgagttttctggagacctgaggtctaatccttagtaatctgcagaaataccaaaggatatactaaggaaaacagaaaaggcattcctctaaaaatagctagttttttttttaatgtaatagcttgcagtaaacaatggcaacaatacagaaaactgctttcctccctactctctttgctctcccctctgtgctgtttccttttccttggtaaccagtgttgttactgtatgtatcttcctaagattttctttccatttacaaaaatgcatatccattttttggtgctttgtacagatggcatcatgcattgtgcattgcagcttgcctttttcacctaacattttctctatctccctccttttcggctgctcaccctggggttcatttccccgcagctctgtctgttcccttggcagtcctctcccactgctctccaactcctgacaccttccattgtctctctttttctatttgccttcttgttcttaaggattcttaaatgttttaagcagcctctgttccccttcttagactaatgtttttaaatgggtaaaatacgtaagacttgtgaaggaaaacaattattttgaaatatagctattaacatttttagatatagtaatacgtttgttcttttattaacttattaaataatccaggggtgagtataacaactgccctaatttttagatgctgatgagcataaataatgctttgagttgcctgcagcaagtagtttgatgagaatatctgatttgtttttattacaaagtcacaggtgttgctaatactactgtgtatcctgcctactctcataagtaaagaaaaattcaaagttcggttagtgaaaataaaaatgtaatctttttcacatctaaggttatgaacctcttgaattttgtgaggccatgggcttctgaataagaacttctgcagttgaaacttggttcacactggaggacactgattgttttttgtagtccactcaagcagtggaattttctgttgcagaccccctttccttgggcctggaggggttatcctttaccccctttgctacttccagatcactctccctcccaccttccttaacatcaaatagaaaacatgatattcaatctcatgatacatcttgtagttttccatggaaccttgactgacttccttctcatttaatgaagattttgtcttatatggctcattttctctagtacttctttattctagttcttgatctcaacatccaggtgggagactcttccactaccttcctggcctcttaatatcttgacttcctgcaaagtttccaccctacctcagctatcatggtcataccccagttctgttatacaataataacaaaaaattataaccccttccataatttcagttctaccctgatcatcacttcccactttactggctcatgccttctagtgccaacaattcttttatctcactgagacttagaacccattgaccctattatctttgcactgttcctcaccatactctctccttatgtccttacccttctctttattcagtttaatttctgttgttggtcatgattgttcagttgcaaatattctcagtacacttgccctcacttgcttcattgcttaatagagaaaccccagtttctctattaagaaccgcagttggttaaatccaactgtgcctactctacacttgtactttttaaaaatgtggtttagaaaaatggatatcaactgggcacggtggctcatgcctgtaatcccagcactttgggaaggcccagacaggaggattacttgaacccaggagtttgagatcggagtggacaacatagtgaaacactgtgtctgcaaaaaaattaaaaagttatttgggcatggtggcatatgcccgtagttccagctacttgggaggctaaagtgggaggatcacttgagcctgatgaggtttaggttgcagtgagctgtcattgcaccactgtactccagtgggtgactgagcctgaccctgtctcaaaagaaaaaaaaaagaacatgtatttaccctcttaacaattattaagtatacatcacagtgttacaatattgttcattattttatacaacagatctctagaactttttttttgttctctgcagttacaagcttttaaaaattttatttttaggccaggcgcagtggctcatgcctgtaatcccagcactttggaaggctgaggcaggtggatcacctgaggttgggagtttgagaccaggctgaccaacatggagaaaccccgtctctactaaaaatacaaaattagccaggcatggtggtgcatgcatgtaatctcatctaccggggatgctgaggcaggagaattgcttgaacccaggaggcagaggttgcagtgagtcaagatggtgccattgcactccagcctgggtaacaagagcgaaactcaaaaaaaaaaaaaaaattaaattgacaaatgtacgtatttagggggtacataatgttgacataaatgtacatatttatggggtatgtagtgatgttttgatacatataatgcatgacaggcttgtccaactcatggctcatgggctacatgtggcccaggatagcttcgaatacagaccaacacaaattcctaaactttcttaaaacatgagattttttttgcaatttttttttttggtagctcatcagctatcattagtggattttcttgttgttgttttatttaatttttttatttaaaaaatacataatttttaatagaaatggggtctcaccatgttgtccaggccattcccaaactcctgagctcaagcagtctgcttgccttggcctcccaaagtgctggattacagatgtgagccaccgtgcctgccctgccgctagtgtattttatgtgtggtccaagacaatttttcttcttccatcgtggcccagggaagccaaaagattggatacccctactgtacagtgatcagatcaggataattagcatatccatcatcttaaacatttataatttctttttgttcggaacgtttgatattctccttctagctatttgaaactgtatattattgttcactatagccttcctaccgtaggataaaggataaagtactagaatttattcctcctgtcttgctgtaattttgtatcctttaacaaatttctccctgtccctccctttcctctacccttcctatcctctgttctgtgttttacttataagttttttagtttccacatgagtgagaacatgtggtgattaactttctgttcctggcttatttcatttaatataatgtcttccagttccatccatattgctgtgaatgagtggattttatttatgtattttctttttttttttttttttttaagtagagatggggtttcaccatgttggccagtctgatcttgaactcctgacttcaagtgatccattcctctcagcctgccaaagggctgggattacaggcatcagtcaccatactcagcccagattttattttttatgactgaggagtattccactgtgtatgtataccatattttctttatccattcctctgttattagatgtcccgtttgtctaacccatatctaggctgtttgaatagcagtaaacatggggatgcagatgtgccttcaacagaatgatttcctttcctctggataaattcctagtagtggaatgctggatcatatggtaattctgtttgtagttatttgaggaaactctgtactgttctgtcttgtggctgtactagtttgtattcccaccaataaagtgtaagtgttcccttttctcctgtccttgtcagcacttgttactttttaaattgaattgtttatctttttccccgtttgcccatttgcccatttttaattggattgtttatctttttcctgttgagatgtttgagttacttgtatattctggatattggccattctttttgataatagccgttttaactggggttagagttgtggttttgatttgcatttccctgatgattagtgctgttgagctttatttatttatttagacagaatcttgctctgttgcccaggctggaatgctgtggcctgatcactgtccactctaagctcaacctcctgggcttaggcaatcctcctacctcaacttcctgagtagctgggactacagatgtgtgccaatgggcccagctaatttttaagagttttttggagagattgggtctcgctatgttgcccaggcttgtctcaaattcctggccttcagcgatctttcagcatcagcctcccaaagtgctgggactacaggtgtgagccaccatgctctgcccttctttgtttttgttttgtgaaagagacaggatctccttgtcacccaggccagaatgcagtagtgcgatcctaactcattataaccttgaactcctggcctcaaggtatcctcccaccttggcctcccgaacgctgggattacaggcatgagcccctggtaatagcacctggcctatttcatttgttttttggccatttttcttcttttgagaaatgtgtctgttcagatcatttgcccattttttaattggatttgttttgctgttgagatgtttgagttacttgtatattctgtatattaatcccctgttggatgagtagtttgcaaatattttctcactttctgtagctcgtctcttcatgatgttaatgggttcttttgctgtgcagtagctttttagtttaatataatcccatttgtttatttttgcttttgatgcctgtgtttttgaggttttacccataaaatattttcccagaccagtgtcctaaaatgtttcccctatgttttcttacagtggtttttatcatttcaaatcttttttttttgagacggagtcttgctctgtcgctcaggctggagtgcagtggcacgatctcggctcactgcaacctccgcctcccaggttcaagcaattctcctgcctcagcctcccgagtagctgggattacaggcgtgcaccaccacgcccggctaatttttgtatttttagtggagacggggtttcaccatgttggtcaggctggtctcgagttcctgacctcatgatcctcctgcctccgcctcccaaagtgctgggattacaggcgtgagcgtgagccaccacgcctggctaaggatttataatagatttaaagcattctgatgggcaaagaaccagggaaaggaaagtcaaaggcagtactgtccaatatgacatgtaattttaaactttctagttgccacattaaaaaagtaaaaataatcgtgtgaaatcagttttgttttttcaattgagacaaggtctcaccacgttgcccaggctggtctcaagctacttgggctcaagcaatcctcccacagtgctgggattacaggtgtgagccaccgtgcctggccaaaatcagttttaatatatttctttaatctaatatatccctaacagtatcaccatgttggtcaagctggtctcgaactcttgacctggtgatccgcccgccttggcctcgcaaagtactgggattacaggcgtgagacaccatgcccggctctcatttcgaatcttacacttaggtctttgatttcttttgagttgatttttgtatagggtgagtgttgggcgtctgcttttattcttctgcatatggatatccatttttcccagcaccatttattgaagagactgtctttttcccaatgagtgtttttggcacttttgtgagaaatccgctggctgtagataggtagattaatttctgggttctctgttttgttccattagtgtatgtatctgtttttaatgctgcaccatgctgttttggttactacagccttgtagtatattttcaggtgttgtattgtgatacctccaactttttgctcagggttgctttggttattcgggggcttttgtggttctgtacaaattttaggatttgtttttccgtgaagaatgtcattggtattttgatagggattgcattggatctgtagattgctttgtgtagtatttctggcactttctcatcttgcctgactgaaactctgtactttagagcaactccctatttccctctcccttcagctcctggcaaccaccagtctaccattttactttctgtctctatgagtttgattatttaagatacctcatgtaagtggaattatgcagtacttgttgttttatgattggcgtatttcacttagcataaagtccccatggttcatccattttgtagcatatgacaggatttctttttttttttttttttttttttgagatggagtctcactctgtcacccaggcaggctggagtgcagtggcgcgatctgggctcactgcaacccccgcctcccaggttcaagtgattcttctgcctcagcctcctaagtagctgggattacaggcatgagccaccacgcctaatttttgtatttttggtagagacggggtttcactacgttggtcagcctggtcttgaactcctgacctcaggtgatcctcccgcctcggcctcccaaagtgctgggattacaggtgtgagccatcatgccaggtccaggatttctttagggctgaataatatccagttgtgtatatgtaccacatttgttgatccatttatctgttgagagacacaagttaattacacgttttggctattgtagtgaatagtgctgcagtggacaagagtatgtaaatatctcttcgagatcctgttttcaatttttttagatatatactgagaagtgggatttctggatcatctggtattccattttaaattttttgaggaacgtccatactgtttttcatagtgattgtactgttttatagtcccaccaacaatgcacaggagttctaattcctccacatccttgccaacacttggttttctgtttttttgttttttgtttttttttgatagaggtaattttaactggtgtgaggtgatacctcagtgtgatttgatgtgagttttgccgatgattagtgatgttgagtagcttttcatattttttttggccatttatgtatcttctttgtaaaaatgtctattcaagtccttagctcattttaaagttgtgttatttgtggtttttgttttgttactgagttgtaggagttttttttttattctggatattaaacccctatccaatacatgatttgcaaatattttctctcattctgtaggttgccttttcactcttccttggtttcattctggttttggttgattgcttgccttgctgcacagaagtttgtaagtttgatgtaattctgtgtctatttttgcctttgttgcctgtgctttttgttttgcagccaagaaatcattgccaaattcagtatcatgaagcttctctatgtttccttctagttttatggtttcaggtcttatgtttaggtctttaatcaatttttagttattttttatttatggtttaagataaggatccatcttcattctgttgcatgtggacatccagtttttccagcactatttgttgaagagattattctttccccattgcgtagtcttggctcatcatttgaccacatacacaggggtttatatctgggctgtctgttctgttccattggtttacatgtctgtatgctagtactattttgatcactgtagctttgtaacaagttttgaaatcagaaagtgtgaagcctacagttttgttcttaatcaaggttgttttggctatttggggtcctttgagattacttactgatttcaggatggctttttctcattttgcaaaaaatgacactgaaatttgatagagattgcattgaatcagtagattactttggatagtatgtacattttaacaatataaggtcttccagtccttgaacatgagatgtctttcccatttgtgtgtttaattttttcctcagttttttgtcatttttagtgtacaagtcttttgcctccttgacgtttatttttaagtattttattttagttttactttatttttttagaaacgggatctcgttctgtcacccaggttggagtgcagtggcgtgatcatggctcactgccacctcccactgctgggctcaagagatcctcctgcctcagccttccgcgtagctgggactacaggcctgcatcaccatgaccagctaacttttaaattttttgtacagatggggtcttgccatcttgcccaagctggtctcgaagtgctggaattacaggtgtgagccactgtgctggccttattcttaagtattattcattttgatgttattataaatggagttattttcttaatttcctttttgtgttgtttattgttaatgtatagaaatgcaacttatttttgtgtgttgactttgtatcctcctgctttgcttagtttattataatagttctaacagtttttttgtgaaacccttagggtttttcatgtataaaatcatgtcttctgtgaatggagataattttacttcttcctttccaatttggatgcctttttttcttgcctcctttttctgattgtactgtgttgagtagaagtggtgagagtggacttcctagtcttgttcctgatcttagagggaaagctttcagtttttcaccattgtaatgtttgctgtggactttttatgtatggtctttattatgttcaggtaatttccttctattccttcctagtttgttgagtgtttttatcatgaaaggtgttgaattttgtcagatgctttttctgcaccagttcagattgttacatgatttttgtccttcattcggttaatgtggtgtattacatttactgatttttgtgtgttgagccatccttgcatcctaggaataaggctccctcagtcatcgtgtatgattttaatatgcctttgaatttggtttggtaacattttttgagaatatgtgcatcaaagtttagaagtgtttcttcagtttttttggtgagactttgaggaggtttggtattaatttttctctaaacgtttggtagaattccccagtgaagctatctggtcctgggctttttttgttgttgggaagtttttaaaattactgagtcagtttccttactagttataggtttgttaagattttctgtttcttcgtgattcagtcctggcaggttgtgtgtttctaataattcatccatttcttctaggttgtctaaattgttggcatgtgatcgttcatagtagtctcttatccttttcatttctgtggcatttgttgtaatgtcccctctttcatttctgattttaattatttgagtcttgtttttttttcttaaatctggctaaggatttgtcaattttattgatcttatttaagatctttttaaatgtaggcatttactgctataaacttccctcttagcacggcttttctgtatcccttaagttttggaatgttctgttttcttcttcatttgtctcaagatgttttctaaactgccttgtgatttcttctttgagtcattagtttttcaaaagtgtgttaaatatttgtgaattttttagttttcctactgcttttgatttcccattgtggtcagaaaagatacttgctatgatttcagtcttcttaaatttgctaagacttgttctgtggcctaacatgtgatctgtcttggagaatgttgcatgtgtacttgagaaaatgtgtattcagctagtgttgggtgtagtgtttttttgtttgtttgtttttgagatggagtttccgctcttgttgcccaggctgcagtgcagtggtgggaactcagcccaccgcaatctgcgcctcctgggttcaagtgattctcctgcctcaccttcccgagtagctgggattataggcatgtgccaccacatctagctaattttgtatttttagtagagacagggtttctccaatttggtcaggctggtcccgaactcctgacctcaggtgatctgcccacttggcctcccaaagctgggattataggcgtgagccactgcgcccggccgggtatagtgttctttatgtgtccgttagttccagttactctccagtgttcaaattctgtgtctcctcattgatccgctctccggtggttctgtccattattgaaagtggggatactgaaatctcctgctgttactgggttactgtctgttttttctttcaattctgtcagtgtttgccttgttatatttgggtgctctggttctgcacttgcacctttacagctgcgcttggctggagaattaacttggctgattggccttaccactaattaccactaagttcaggagagtccttaaaactgcacagcagtagttcctagttcatttattctcccagtgtgacctaaatgatcatttagacctgctccttctcaatccttcaacgtcactttcaccgtctttagcacacaactttgcttttcattttgttgagaaaacagataccacaagaaaaatatctgcaaagctcctgccactactgcctgtgtctgtgcttcatgtattctcacatccctcaattattacggaatgaactgaccatgcttctagccagggccaaaacctgcactgtgctcactcagcccttgcctctacactctgcagggtcattctcctccacaacaacatactgttgtttctctcatcttaaaacacaacaaaacttctctgaactccatttttccttctaaccgttgttcatttcccaccccgaccccttttttccctaaaagaagtatctgcactttgtttccaatttttctcctcctgatatttcaggaggctttccctcccagcaccctgtttcttgcactgctcttgcgaggtcagctctgaccctacctttctcatccttgaattatttgacctagtaacagtatttgacactggtgattacttatttcctgctcgttgaaacactttgttcacttggcttccaggatagcatacaaagaaattccccatctcagtcttttgtcacagagtccctccagggctcagtccttagacctctgttttaactatgctcatttccttgttgatcttatttgacccactggctttgaaaccctctttgttttaaagtttgacggaagtccaaattttaaatctccagcctgagccgcttctttgaaatgcagacttatgttccacctggatgtctaataggcaaatgaaatgcagctttctctaaagggaacttattcttcctccagtaacttaatgggccatgcttagaatggctctttttgtccaagaaaattcaaaaccaaaaccaaatctattttcttctgctttaacatcagtctacagattatttttggtctaaagcatgagatagggctttttatttatttttaatcaggcggctagctagtttcttaacagtattgaataatatatttttaattgtttgaattgtcatctttattgttctgagaataatatcaaggatttaagtgaaattgccatctaatgtttgcattatagatttcatgcccctttaaaacatgtgttatatcaattgagagcacactcttataaagtacaatcaatgataatcaatggattttttaaaaaagaactaaataagttgcataagagcacagaaacaaactttaaatttagcatttaatagaccaggaacaacacaccagtaaagaaaggggtcactaattactgtttggatacttggattttagtttgaaaaataagtaaaatttacatagtaaaaagcaataaagtaaatttaacacggaaagtaacaatggagtatgaaatatatgaccaaactaatggaagtttctgtctaaaataaaagatctatttgtagggtaagtaattagattgggagtaaaaggcagaaatagtaaaatcatcacatgcacaaatgctgtctgtatttaatcccagttaaagacatgggaaataagataaccctaaggctataatgctcacctattaaactgacagaagtatgtaatatgaggaaatagcatgtcttgtttggtcagtgtattagtcgattctcacattgatacaaagaaataccaaagactgggtagtttataaagaaaagagaattaatggactcacagtaatgcaggctatacaggaggcatggctggagaggcctcaggaaacttacaatcatggcagaaggggaagaggaagcaggcctatcttcacatgacagcaggagagacagcaaagaggggaatgccacatgcttccagatctcttgagaactcactatcatgagtacagcaagggggaaatctgcccccccccataatccaatcatctcccagcaggccccacctctaacactcaggatcacagttcaacatgagatttgggtgggaacacagagccaagccatgtcagtcagtatcataaattggttcaaccatagaggaagagaatttgactaaatacatattttagggaaaagggaagtactgtgggctcagcggtttgatcttaaaatttctatgcagtgatggcatactatattcctaatctaactagggtttgtttcaagggaattagggataaggtgagtaagctagtaaacccaaggcaaaatttcttaatgctttttaaaatttaaaaaagaggcccattccgttagagcatacattgaatcaaatgtttcatgtaaaacaggatggaaatgaacttttctatttggctaagtggtgtaggcagaaaaacctataggctttctcttttcatcaacttcatgctgagtcctgtctcattttattatttacacaattgaaatataaaaaattgttcccaaatgatgccccccataccctaagtttagggggcagtagtgtaaagcagtgtccagacattggtcttagggctggagtggaaacagactcctagaggtgcacaagcacatggataattttacctgaatcaatttccaaatcctaaactttaaatgtctcttttttgaagcatttcttcctttgaaccagtgttcaagcggttcttccctttttattttttgatgtggagtttggctcttgtcacccaggttggagttgcaatagtgtgatctcggctcactgtaacctccgcctcctgggttcacgcgactctcctgcttcagcctcctgagtagctgggattacaggtgcctgcaccatgcccggcttatttttgtatttttagtagagatagggtttcatcatattggccaggctggtctcgaactcctgaccttaggcgattcacccacctcagtctcccaaagtgctgggattacagttgtgagccactgcgcccagttctgttttcaaattcctttccaccatggctttttccattattaaaaaaaatggcataactcttcctctgacccttctcttaccatgatgcacttgccttgtagtgggaaaacctcagggatgaaaagggtgtcaggacaattctaagacaccaatggaatagtgctggaagaattagatattcagttgcaaaagaatgcaattagacctttacctcataccataaacaaaaatcaactcaaaatgaatcaaaaacctaaatgtaagagctaaaaccataaaaatcttagaagaaaacataggtataaatcttggtgaccttggattaggcagtgatttcttcaatatgacaacaaagcacaagcaatcagaaaaaagtagataaattaaactttatcaaaattaaaaacctgtgtgcataaaaggacgctgtcgagtgagaaaacaagccatagaatgggagaaaatactgtaaaatatatttgataagcagcttgtgtctagaatacataaagaacacataactggctgggcgccgtggctcacacctgtaattccagcactttgggagactgaggtgggcggatcacttgaggtcaggagttcgagaccagcctggccaacatggtgaaacgccatctctgctagaaatacaaaaattagctgggtgtgatggtgggcacctataatcccagctgcttgggaggctgaggtaggagaattgcttgaacctggaaggcagaggttgcagtgagccaaaatcatgccactgcactccatcctgggtgacagagtgaaaactctgtcttagaaaaaaaaaacaaacaaacacgtaactaacttagaaaaccaaaaatctaatttaaaaacaggcaaaggattcagatagacattactccaaagaagatgtacaaatggctacataagctcatgaaaataatgtcgttagtcattagaaatataaatcaaaggctgggcacggtggctcacgcctgtaatcctagcactttgggaggccgaggagggcagatcatgaggtcaggagatcgagaccatcctggctaacacagcgaaaccccgtctccactaaaaatacaaaaaattagccgggcgtggtggcaggttcctgtagtcccagctactcaagaggctgaagcaggagaatggcgtgaacccaggaggcagagcttgcagtgagccgagatcttgccactgccactgcactccagcctggacgacagagcgagactctgtctccaaaaaaaaaaaaaaaaaaaaaaaaaaatatatatatatatatatatatatatatatatatatatatatatatatcaaaaccacaatgagattctgcttcttacccactaggatgtctataatcaaaaagatagataataacaaatgctggtaaggatatggagaaatgggaacctccagacactatttgtgggaatataaaatcgtgcagctggtctggaaacagattagcagttcctcaaaaagctaaatgttgagtttccatatgatccagcagttccactcctagatatatatccaaaagcattaaaaacatgttcacacaaaaatttgtgcatgaaagtttacagcagcattattcataataggaggaaacaacccaaatgtccaaccgataaatagataaacaaaatgtggtctgtctaggcaatggaatattactcacccatgaaaagaaatgaagtactcactcattttacaacatagatgaattttgaaaacattaatgcaggttgaaagaagtcagtcacaaaatatcgtatgttgtattattcttatttttatgaaaggtccggaaaaggtaagtccacagagaaagtagattagtgataaaaatgtactggaattagtgttgatggttgcacaactttgtgaatatgccgatagctactgaactgcacactttaaaagagtgaattttattatacgtcaattatatctccaaagaatggaataaagcctcaggggcccccaaagtggtgattccaaatattggttttagtgttaagaaaatgaatggccatagcctttggagaacaaatcctttcatggtttttcagttttccacttctaacaaaattgaaggatcaattccaatatttacaaataataaatgtgttagctactaaatcatttaaaatatttctggtggaaaacaactatgtaattttcaacagataactcagaagaaattttaaaagtcatgtgacccaactgacagaattccttttatttccatcacctgtttatatgagcaagccttctcagtgcttgctttttttttttttttgagacaaagtctcgctctgtttcccaggctggagtgcagtggtgcgatctcggctcactgcaagctccgcctcctgggttcaagcaattcttctgcctcagcctcttgagtagctgggactacaggcacgtgccaccatgcctggctaattttttgtatttttagtagagacggggtttcaccatgttggccaggctggtctcaatctcctcacctcgtgatgtccccgcctcggcctcccaaagtgctgggattacaggcgtgagccaccgcacccagccctcagtgctttcttgaaacacacgcacagaaaagtagaaattcactaagtgatgtctgattttagcaataattattcaaagagatacatgaactaatgaagaaaaaaaaaaagccctgtccatctcattaagagacgtacatttccagtaatttttctttccttctttacttccttcctccctccctccctccctccctcccttccttccttccttccttccctccctccctccctcttgctctgttgcccaggctggagtgcagtggtgcactattttggctcactgcaacctctgcccctgggttcaagcatttctcccatgtcagccttcccgagtagctgggactacagatgtgtgccaccatgcctggcttttttttttttgctagagatgggggtttcaccacgttggccaggctggtctcaaactcctgacctcaagtgatcgcctgctttggcctcccggaagtgctgggattataggcgtgagccactgttcccagcctccagtagaatttttacctttaatgttgttaattactgtcagatcttttttttttttttttttttttttagatggactcttactctgttgctaggctggagtgctgtggcatgatctctgctcactgcaacctccaactccctggttcaagcaattctcctacctcagcctcccgagtagctgggattacgggcacacgccaccatgcctagctaatttttgtatttttagtagagatgggtttcaccatgttagccaggatggtcttgatctcctgacattgtggtccgcttgcctcagcttcccagagtgctgggattacaggcatgagccagcatgcctggcctactgtcagatctttaatgtttgccatttaaatgaattgcatactgctaaaaattataatggtaattgaattcaaaataattttttaaacacttagaagcttctttatggtcaggaaatttaaaatgtttttcatttaaacatcagacaggctgggtgcagtggctcaaacctgtaatcccatcactttgggaggccaaggcaggaggattgcttgagtccaggagtttgaaaccaaccagggcaacatagggagaatctgtctctataaaacaaacaaacaaacagaacttcagacatgtatgactgagtgactaataagacttccaagcattagcaattactatatgcagggcaaatgtactggaaatatgaattcaaggaggaaaatatgctgtgaaaatttcactttaaaatggatcatgatgggtatcagatcacaattgtatttggattctgttgaagagatttaaggttgatattacagtgaccttgctaaattatattgctgttctgtgctctgtttccctatatataaatgggataataatagcacctatatcaaggagtaatttattattatgtctagtgcagcttcttggcaaatactctgttcagtgattcacattctgtttaatagcccactgctttgtttctttctggtaagtcttctgccttaatgcagtcttctctagctactatgtgtccttttttcatcctcctgatctatacccccccccaccccccgccaccccacacacacatggtggtgtggacaaggcaaaaaagaaagttagctggatttatgtttcggaatttcagggctttgtatttacagttgacttgttaggagaagaggaagaagaattaaaaagtatagcattgggccagaatatcattaagcagtaagatcacattgagttgtatagggaagggtacctgtatttttatttcatctgtactggagacaggatttctgatgacacgcttgctcactgacagtttttttttttttttgagatggagtttcgctgttgttgcccaggctggagtgcaatggcgtgatctcggctctctgcaacctctgcctcccggattcaagcgattctcctgtctcagcctcccgagtagctgggattacaggtgcatgccaccacgcctagctaatttttgtatttttagtagagacagggtttcatcatattgatcaggctggtctcaggtgatctgcctgcctcggcctcccaaagtgctgggattacaggtgagccactgcgccaggcctgacagatagtttttttagatggtgtaagacagtgtcaattatgtagtgtagttggtatattttctgttgttactgtaacaaattaccatacttttagtggtttatagagcacaaatttattatcttatggttctgcaggtcagaagtccaacacaggtctcactaggctaagatgcaggtgtctacagggccgtgttcctttcgggaagttctaaggaagtatggattctgtgcctcttacagcctctagaggctggctgcattcctggatcaggctccccttcctgttcaccttcacagtcagcaaggtgacatggctctgacctcctgtcatctctttcccaccgtacttgggagaagttctctgcttttaaggaccatgtgagtagattggtcccaacaagctcatccaggataatcgccccatctcaggttttggacccttagtcacacatctgcaaagtcccttttgccatttaaataacatattcataggttacagggattaggatgtgaatgtctgcaggggccattatcctgctaccacagttggtttttagtcagctacataattttgaactgttaattttatctattttttttttatgacagttgtggttagaggtgaggcttggattggtcctggcctgaatcttgttctgctgtgtagcagcactgtgacgttaggcaagtttcttctctgtacttgtttcttctttggtgaaatcaagatagtaatgcttgtctgtatgtactgaaataaagtaatagtttagggttctagatgggaggcaagagatttctaccaatctttttgtgtctgtctcaaataagcaaatatgtgatcacctaactcacaaggttgttgtgaagatcaaattaagtcatcaagttagagtgccttttgaaatgtataaaaagtatataacattttgttggtattaattttagaatggcttttaagatttttgtcaaaggtgagaacgttcagtacattctttgatacctgcctagcaactatttttaggtttctattcctttccagattttcagattcacatatttcctttattaaattatggtaaatgaaaagataatatgagaattaaaagtaatgacttctgtgattcgtatagtcactaggatttaaaattcaaatttatctatatctatatctatagatatagatatatagatatagatatagttttttttttttagatagagagtttcgctcttgtttcccaggatggagtgcaatggtgccatcttgactcaccgcacactccacctccttggttcaagcagttctcctgcctcagcctcccgagtagctgggattacaggcatgcaccaccacaactagctaattttgtatttttagtagagatggggtttctccatgttggtcaggctggtcttgaactcccgacctcaggtgatctgcctgcttctgcctcccaaagtgctgggattataggggtgagccaccactcctggcctatctagataatttttaatctttatttttttttttctgtagacttatttggagctatactatatgtgttgtagaagcaaaataaatactaagtctaccttgcattagtaagactgatttttcttaaatcctgagctacatttaaaatcttggttagtagacattttactcagatagtgattcatttataattggcttgtctaagtactcagtgtttgacaaaaatatcactatgttaagcaaaaaccatatttaaaaagtgatttgttttttttttttcctaacgctgtaacagtgaatagatctttttcccctaagcagcacaaagatgccattttgggaggttaaattactttctaaaagttgctgtgaaggagagaaggaaaagagatcaggttacacattctttgttcctgagcctaccactgcacacgttcagagaagcaatagtgaggctagagtatgcatttgccactatgtcttcaacccttccccatagtagggagggagggaattaggcagttttcctaacagggccccgaagagtaccattttaacttaaatactcttaaaagttgctacttattttttttaaggctttctttacttttttataatttagcatttcaagtaatccaaatagttatttctttgtatattcagaggtatttaaaaatattttctttgagagcttaaaggttatagtttaataatgcagttaaacatcaatttatctcaaattgatattgagttaaatttaaagagtattttaaattatattttgaggggaaaaaaataactttcttggcacaaaatggccatgaattagattgtgtgtttcagaaaggtagtggtaaaaagtccccaaagcagttacaatatttcttttgttctgtttccttgctactcttagataaatgaagagtttgaaaagaattttcacataaaaacgtcataaaatcccagtgccatattctgaatattaatttgactgttttatgtcgtatttttttcccagttggttttagttagaatatatgcttttttttaagcctttaaggaattaaacaattttggttattaaagtttaaatgtatttcataaatatgtatttataaatatgtgactggtcccttttctgaggggttaggaagtttaagcattatttgtaagctatttgtaaatccctgtcaaacattatttgtccattaagaaatactatttttttcttcacttttaggtcattttaagtattaataatgttcatcaatttacttactacccttctgaagaaagtcactataattagtaatcagaattatatcacataaatttaggcacatttatttatttatttatttatttatttatttatttatttttagtattttgagagtaggtgctgtattttcttttctttccttgtttcttcttttttgttttttgagacagaatctctctctgttgcccaggctggagtacagtggcatgatctcagttcactgcaacttccccctcctaggctctagcagtgcttccacctcagcctcccaagtagctgggaccagctcacgctaccactccagctaatttttgtattttttgtagagacagggttttgccatgtcaccgagactgagttactgtattttcttagcagaatattgtcccagtgagctttttccaaaagagaaaaggtacagccaataaaagtttgtggttgggtattgggagttggtgttgttctgttttgtcctgttcataaaagttttattctctttagctctcatgctttagttctaatttattcacagatttttgcccagtaacttgattttatacttggctttctatattgtggctccaatttttcttcccagtttatactcttatttttcctttctttttcttttcttttcttttttttttttttttgagacagtcttgctctgtcgcccaggctggagtgcagtggcgcgatctctgctcactgcagcctccgcctcccaagttcaagcaattctcctgcctcagcctccagagcagctgggattacaggcgcctgccaccaagcccggctaatttttttttttttttttgagacggagtcttgctctgttgtctgggctggagtgtagtggcccaatctcggttcactgcaacctccacctcctgggttcaagtgattctcctgcctcagcctcctgagtagctgggattacaggcgcccaccactatgtccagctaattttttgtatttttagtagagatggggtttcgcagtgttggttgggctggtcttggaactcctggcctcgtgattcgcccacttcggcctccctgagtgttgggattacaggcatgaactactgcgcccagccaatttttgtatttttagtagagacgaggtttcaccacgttggccagcctggtcttgaactcctgacctcaagtgatccgcccacctcagcctcccaaagtgctggggattacaggcgtgagccaccgtgcccggccagaatttgaactttaattcttcaaattgtatagcattttcaggtaccatcgagggcttttcttctgtacttctgtgtgttcaaatatggaccttgttccaaaaaggtccaaaaaggttgagttgtggttccctgtaatgtcaagaaatctgttaatgcatgagacccggaagatgtttgaaagtgactagtgagaattgggttggttgctgtaggatattgtcatttaaattattaagtgaatatatttatatatttaaaaattagatgtaggtaagcctcagaaatgggaaaatggagataaatcttaggagagatttttgaatcttttacttaagactgtgttcaaaactttgtctatttgctatttattattttgatatattaattgctagtgagattaagacatttttgacacatcctcttcatttaaggtcatggatgttttgtatcattcttatataagcatatttgtaagacttttagaggtattccttttttagtcctatttttttttactagggaattatgactcattttggcacttagcttttgtagcttactaccgtatgacattttatatctttgcaaaaaccaagtaattagaccattcatcacaatttccatacttaaaaaactaatactaagtttttacatgttatcaataaaagtagcattttaacaattatcctttccacattatttgataaatgctattggttttgtctgttatttttataaatatataatttgctttaattacttaaatgttccttgagccttagaacttaaatcctgatgagggttttactttttaaaatactgaagtttattatttatgcatgttttacagaaaaatgagtggcttttaaaagatcaaaattaaaggcttaaacatggaatctctaggacatataaaatatgagtagaactgtgtatttataagatgttaatgtaagacttcaggccttgtaatatcttaaaggaaccacttcactgtaagggagcagtttgtctttctacctttccaattgtattgagattttgcccagtatgtctttttacttaaacaccttggtgaaagctatccagcatcctgttttaaatctcctttgttgcacttaccataattactttcagatctgtttccattctcagaaactgaaactgtaagctcatgtgagtggggaatccgacttgttttattgcatgtgagctgagcactgtgccttgtgtcagtagtcagtggtgttcctttagtccttgttatgttaataaaaaagctttggtttttgcaagactttgtttttagagattctggaaaggaacatattaaccaaaaagaagagctgacttcaattttacttgtcttgaaaataactgactactaaagggatgtcagggaacattagtgaaaatggagaacttaaggagttaaagttttagctgtttttttcaaaggatattgtccttcaaaatctttaccttgcatttttgttactgtgatttaagatggttgtaattatcattgattgatgatacctatcaaaaggcaaccctaaccaaccatttctgctggattctgaatgccgagaaagaaaaactgagaaatttgtgaactattacaagtcgtctgtaaaatgagataataatatcaacttcacaaggtaatttaggctttcgtgaaaactagagtgtgaaaatgcttagtaatgtgctgggcacactgcaggtgctctacaaataactactgataactactttttttcatgagtaattgtacattttctttcttccttcctttcttccttccttccttccttccttccttccttccttcctttcttttcttttcttttcttttctttcttttctttctttctttttttgttttcttttgttttgagacaagatcttgctctgttgcccaagctggagtgaagtggtgtgatcttggatcactgcaacctctgcctcttgggctcaagtgatcctccctccttatcctcctgagtagctgggacaacaggcgcacatcgtcacacccagctaatttttgtatttttgtagagatggggcttcacttggtgttgaattcctgggctcaagcgatccacccacttcgacctcccagcgtgctgtgattacaagagtaattgtaaatttaaaatgaatttctttcccatcccaaaccagtatcaaaatgcaaatatagtaaattactttttaaaagagagatgtttaatggcagttgttggtagtcttttgagtctttaagtgggtatattatagaaaaacaacatatctctgcttggagggaagatttaactaaaaacaagaaaaagaatagtagatgaaccatgattctttaacatacaggttgcaaactagtgacctgtcagttggatttggcctgtaggcatgtttttggcttataatgtaattttttaaaaattagtggccaacaattaaaaattgggagagttttcaaaagaaaatgcagatttctgactcatcttgaaaaatggtaagatgggcagcacagggcctgtattcccaattgcagccctcagtggagctaagtaggctgttctccctgccatctgcccggctctcagttgccatcactcactgcatttggactctttcttcatatagtgagccgaggggggagtgatagtctcatgttcctatcaaaagagggaaacctaaaataaggccatttttgtttttgtttttgttttgtgagacggagtttcgctcttgttgcccaggctggagtgcaatgtgaaatcggctcaccgcaacctccgcctcccaggttcaagcgattcttctgcctcagtctcccaagtagctgggattacaggcttccgccaccatgcccagctaatttttgtattttttagtagagacgggatttcaccatgttggccaggttggtcttgaactcctgagctcaagtgatccacccgcctcggcctcccaaagtgctgggattacaggcatgagccaccacacctggccaggcgatttgtgttttaagaaaaacaagaaagcatgtaattctttgcgaaaataatgaacatttctatttatatctgtcaaaagtcctgtttcttaggagttaagacataattcatagcaattaatatatgtggagaagatacgtaatgaaaaactaactagaagaggaattcagacattgaaagggattattttaaagtgagaataaaattagtagtgccgctgtgaggaaaataatcttcacgtacttacgtatgatgagaaacttcctaagtgtctagagatggcaagaaactttgtatgttttgcatgacagtaattgtaaatatgagcttatctggaaatattgtttgcatagatgttaaaaatatgggcaggacaatgtgtactaaaatgctgaattctagtgaggctgacataagcttattttttaaattctttaatttttgtttttatatattttttgagacagggtctcattctgtcacccaggctggagtgcagtggtgctatcacgggctcactggagccttgacctccccacgctcaggtgatcctcccacctcagcctcctgagtagttggtggcgtgcgccaccatgcccaactgatagtttgtattttttgtaaagatgaggtttcactgtgttgctcaggctggtcttgaactcctgggcccactcaagccatccacccaccttggtctctgaaagttctgggattacgggtgtgagccactgtgcccagcctgatagaagcttagagattaatatcacctagttagctctgtttgtgtatggtatctgtgtgaattttgactgtttctcccctctcttctttagtcattacccctgtttttggttcattcctatcagtaaacaatctctggtagagacttggtaagaaaactcaaccattcccttaaaaaaagtcagcctctaccccttccttagccagatgcttcagggatggtctgcttgcaacacttcctgtccttcaccttctttcaactgtttaacctgccttattcttttttttgtgagacggagtcttgctctgtctcccaggctggagtgcagtggcgcatgttggctcactgcaagctctgcctcccgggttcacgccattctcctgcctcagactcccgagtagcttggactacaggcacccgccaccatgcccggctaattttttgtacttttttagtagagacggagtttcatcatgttagccaggatggtctcgatctcctgaccttgtgatctgcccccctccgccttccaaagtgctgggattacaggtgtgagccaccgccccccacccttgcctgattcttattctcttgtccaccacagtttgcattcctcaggccatttttgtctgcgtcgttgagggcctccattgtccagccccatctcctttactctctcagtagcatttggcacagctggctctcctgtgccaaactcttagccgctgtgacacaactctgcatatagccttccacctctttcagcacagtccagatggtggtgagggacgctccagatcagggctgaggatggtgtcttgttggcttctgcccttaccctgaatcccttaagccctgtgtacagtgagtatcataattctggccttatatactgtaccctacattttgggctaatttatgaaaggataaaaaataggacttggaaagtaaaaataacccatgttaaagaatctgaactacattagtactttttgcctctatactgcacatacaaatgcttgaatgactatgatgtaaaggaaagggagaagaaactaaaaatttgacgtgggatgtcacattcaaataagcagttttttcccctttagaacatttgcttataacctaggtcatttaaccagttgaggttcaagtagctctcagatcagctggtgcaagcttgagggagaaaaaaaaaaaaccatccttacagatacttctcattcattaacctcgaatgttagctttaatcagtttaggaatttgtatgcattttagtaactcaacaccaacttgtcagaagttagctgaattttagataatttctttcattccagccaaaaataataatcacagacatgtttaaaaaaaaaaaaggagttaattgggaggctgaggcaggaggattgcttgagcccaggagttggagacctgcgtggacaacgtagtgagactccatgtctccaaaaaagacaaagattagccaggcattgtgatacatggctgtggccctatctagggatctgcactctagcctgggcgacagagcaagacccggtctcaaaaaaaaaaaaaaaaaaaagaccctaagcctttttttactgcatatattcctatccattctaggaaaagtcagttgtcaaatcaaagtgaaaaattgttttctttaaagtgaagtcagatgggtagaataaaatatactgatgttactgccatagtcacaattctaaagcacaacataattgtaataatgtcacaagcttaccaaggttgctacatgaaacagaagaaaattaaatttggtgttatttatttttataaagagacagcatctcactttgttgcccaggctgatctcaaactcctggcttcaagcagtccttggcttccacagtgttggaattccaggcatgagccaccctgcctggccattattatctttaataacaatttacatcagccacatttttctttatggtttttacttttgatgtcaaacttagacatttttttccccattacagtagtgttttccagttcttttatagttttacattttatatttgaacgttttatttatctggaattagttttgttgcataacgtaaggatccgacttaattttttcccaaatcgttggcaaattctttcaccactctttattgatttgagatgttacttttattatattctcatatatatttggatctacttttggtcttttgtgacctatctcttgacagtggaatcacactgtttatatcagtatagctttgggtacattttaatacttggtaaagcaaatttttctgactttttcaaaagtcgaggatatttgtttatttttccaactgtctttagaaatgttttatctgattctactgaaaagtctgctaatattcattgactgattgatttgatttggagaggactaccatctttacagtatatagtttactaattaataaattcgcgtttcatctttcacaagtcttcttttttgactttcagtaaagttttgtagtttttctcatgtgttatatttttgggtgctattgtgaatgatactatttttccactatattttctaaccagttttgttaatacatacacagcttactaatttttattaaatcattcaacatatttaacttctttttctaataattttcagtttattctcataggggatttaaaatatatcatctttaaataataataactttgctaaatcagttttaatatattcacaattgggacttagtaatatatgggtttggttagtagttttgtatcacatagttttcttttattttgagacagagtcttgttctgtcgcccaggctgaagtgcagtggcgcgatcctggctcactgcaactccacctcgtgggttcaagtgattctcctgcctcagtctccctggtagctgggactacaggcacccaccaccacacccggctaatttttatatttttagcagagatggggtttcgccatctcctgatctcaaactcatgatctcaagtgatccacccacctaggcctcccaaagtgctgggattacaggcatgagccactgagcccagccacacatgattttctttatagaccctatttacaaatttatggtctgaggtactggggattaggactttaatatatgaatttaattcatttattaagtgcaagattggtgcaaggttggtgtttgatgatttcctcagtctttattttgtgaccaccagtgaataacccaagtatttgtgtttttaaacacctttatttggtcaagtatgtctcatgtctataaaaagttttgaatttattttagcttaatgtttgtaggtgttttttttttttttttttttttgctattctaattattttatttgtttgtgtgggtttagaatagcagaaatttattgtctcccaattctagaggctgtacttccaaaatcaagggatccaaaataggagtgtccgcagagccatgctccctttaaaggtaccagggaaggatctgcttctggcctccttcctaactcccggtagcctcaggcgttccttgggtttcagatggcagttttatccctgtctctccccacatgtctgtggtttcatatctagatgtctccctttttataaggatggtatagtcatataggattaggccctaccctgataatctcattttaacttgattacctctgtaaagaccctatttacaaatttatggtctgaggtactggtggttagaacttgaatatatgaatttaattcatttttattattttgaaatcatttcatacttagaaaagatgtaggaataccattgtgaatgcccataatcttcatacccacattcaccagtttttaacattttcccatatttgcattataattctctgtttctgtctcttcactcctacctgtacacacacacacacacacacacacacacttttaagagtgaggttgtatatattatgcccctttacccttactatttcagtttccttttttttttttttttttgagacggagtctcgctctgtcgcccagcctggagtgcagtggcaggatcttggctcactgcaacctccacctccccagttcaagcaattctcctgcctcagcctcccgagtagctaggactacaggcgcgtgccaccacgctgggctaattttttgtatttttagtagagacggggttttgccatgttagccaggatggtctcgatcttctgacctcatgatccacctgcctcggcctcccaaaatgctgggattacaggtatgagctactgtgcccagccttcagctttcattttctaaggacatggatattctgtgtaatcattcttcagttatcaaattcagggagtttaacattgaggcggcactttgatctgcagtctgtattccagttttgtcagttggcccaactgaggtgttttttttttttttttaaagcatttttcccttccagtggaggattcaatctggagtcacatattgcatttggttgtcctgcctctttaatctccttctctctgaagcagttccttagccacctgttgtgtttcatgacatcaacatttttgaagaacaccaggccagttattttctagaatattcctcactttgggcttggcattttctcattattagattcaggtgatgcatctctggccagaagtctacataaatgacgacgtgtccttctagggtatcagaagcatactatgtctgtcctacctgtcattggtcatgttaattttgattacctggtcaaggtgttttccagtttctcttctctataattactgttttccctcttgtaactagtaagcagtctgtggggagaaacttcaagaccacacaaatttcttattcctcataaaattcactgctcccctgcagatttaattggtcttgactatttatagttgtagaatggtgatttttccactttcatcactagttctacatttatcattctgaattctgtaagaacccttcttactcccttatgtatgtatttgatttatctatttagttgtcatcactatggagtgatagactccatttcgttcaatgagttatagtccttatggatttttttcatcagggtctcactcctgttgcccagactacagtgtggtggtgcgatcacagctctctacagccttcacctcccagactcagttgatcctcccatctcagcctcccaagtagctggaactacaggtgcacaccaccaaacctgacgaaatttttttttttaaagtataaatgggggtttcaccatgttggccaggcttgatactcctgggctcaagggatctgcctgtgtcggcctcccaaagtcctgggattacaggcatgagccactgtacctgaccagcccttatgttttctgaggttcatgttgtcccagattttgatagcgggagtctcttcattccggctctcgtgtcctttggatatggccttgtcattttttcttccctttaaaaaaaaataaagagcacttctttatgccatagtgatgttccaggcttctataggaccttctttgccccatccccagaatcagtcatgtctctaaggagccctggtttctgttagtgggattcaatatatagaaaccaagatctgggtcttaggtgttctcattgatactggggtgtcattggttctagccactttcaacaaatgtatctaggaaatagactattattttttaacatactatctttaaaatcatttttagtttatactaatacttctaattctaaaccaacccctcaggatttttttggcctttccccagtccatttcattctaatttcatttccagtttatttttaatttaaaaaaattgaagtataatttatggatttgtgtatttagtgaaatgcatagttcttttttgacttacttgtttatctgacacagaatctctctctctcatccaggctggagtgcagtgacatgatcatagctcattgtagccttgaacttctaggctcaagcggtcctcctgcctcagcctcctgagtagctggggttacagatgtatgccaccatgcctggcagatttttaaattttttgtgtagagacagagtcttgctatgttggctagtctggtcttgaattcctggcctcaagcaattctcctacctcagtctcccaaagagctgggattacaggcatatgccaccatgcccagtccccatctttcttatgtattccgtttaatctgttttgacagtgcatacgcttctgtaatctctatcaagatactgttctatagttgtggttttttttccttttgagacggagttgcactctgttgcccaggctggagtgcagtggcactgtcttggctcactgcaacctctgcctcctgaattcaagcagttttcctgctttagcctccctacaagctgggattacaggcgcacacctccatgcccggctaatttttgtatttttagtagagacggggtttcaccatgttggtcaggctggtcttgaattcttgacctcaggcaatccacccacctcagcagaactcatttgggcctgttgttttctgttttggaaggttactgcttactgatgcaatatctttaatagatataggcctatttggattatctatatcttcttgtgtgagttttggcatattgtgtcttttaaggaattgatccatgtcatctaaattatcaaatttttaatcatgtttgttcataatattcctttataatccttttaatgtacatttagaagggatctgtagtgatcttttttttcatttctgatactagctatttgtgtcatctttttaattaattggcttagctaaaggcttatcaattttatgatcttttcaaagaaccagcttttagtttttcttactgatttcctattttcagtatcattgatactattatatttttatttcttttattccacttactttggatttaatttgctctttgttttctattttccaaaggtggaactgtgagctttggtccattcaacttatttcatgtaacgtcaattcaccgaaagagttaagagatttgaagcaatggcctgagtttgaatcctagttctccactcattgacaaaccacttgtcctgtctgaaccctatctcccataaaatggaagaaggatattacttaagttatgagattgcttgaaattcagttacaatgtgggtgaaaactgattttaaactgtgaagtgctacagttttgatattatcacttccttaaatgtacaaagattatttctttacaatcaccattggaattttgcctcaatttatggtcaaactttgtctggttttcagtttccagaatttccatctctcacctgctacccaaatcaggatggctaccaaacctgcccatcttcagtaatctttcgtttctctgattcatcacaggttacttatagggatccagttatcttccctgaatgtttctcagtatttgaattgtaaattataatcctgtcttggaacaaaagaacttgaactcatattgagtcctgtgctcacctatctgttttgatcttcttttattatgagtcgttcattcattgtgaaaaatctcatttcagtgatagggaaggcaaaaaaaatcagtctcctgacttttttcctctcctgttttattaaaattataaaatatgcataacataaaatttaccatcttaaccattttaaagtatacaattccagttgcattaagtatatttacagtgtcatggaattatcactactatgtattttcagaactttttcatcatcccaaacaggcccccctcccttttttttttgagacagggtctcactctgtcacccaggctggagtgcagtggcacaatcatagctcactgcaacctccacttcccatgctcaagcgattctcccacctcagcttctcaagtagccgggactacaggtgcgtgccatcacacctagctaatttttgtatttttattttgccgagatgcggttttgccatgttgcccagtctggtcttgaattcctgggctcaagtgatcctcctgcctcagtcttccaaagtccggggattacaggagtaaggcaccacacccgacctctttttttttttttttttctcttttttctttttttaagagacagggtcttattctgtcgtctaggcctcagctcctggcctcaagcgatcctctcccctcagcctccccaagtattgggattgcaggtgtgagccaggacgcctacccgcaaacagaaactctttacccattaaacaataactctgtagtattccttccttcctgcccctggtaaccactatagtactttctgtctaatatgaatttgcctgttcgaggtgcctcatataggtggaattgcatatttgtgcctggcatatttcatttagcacattttttcaaggctcatccatatagcacgtatcagtacttcatttcttttagttgctgaatattattattattattatttttgagacagagtctcactctgtctcttaggctagagtgcagtagcatgatctcggctcactgcaacctccgcctcccgggttcaagcgattcttgtgtctcagcttcccgagtagctgagattacaggcgcccaccaccacgcccgactaatttttgtattattattattttttagtagagacagggtttcaccatgttggccaggctggtcttgaactactgacctcaggtgatccacccgcctcagtctcccaaagtgctgggattacaggcgtgagccaacacgcctggctgctgaatattattttattgtgtagagtaatgtattcattcgttggttgataaggcatttgggttattttcaccttttggctgttgttccagataatgctgctatgagcatatttgtacaggtttttgtgtggaaatatgtttttgtttctcttcggtatataggaaaagaattacagaatcaactctgtgcttaaccatttgaagaactggttttcttttccaaaatggctgcaccatttacagccctgccagcaggttataaaagttccagcttctctgcatccttggcaacatttgttattatttttttattatagccactcaggtgggtctgaagtattttgtcgtgttttttatttgtgtttccttgttactgatatcgttcagcatatttccatgtgcttattgctcatatgcatatgttctttggagaactgtctgagattctttgctcatttttaactgggttatttctctttttattgttgaatttcaatggttctttatatattccagatacaagtccttatcagttacatgatttacaaaaattttctaccattcccattccttgagttgtcttttcactttcttgatggtgccctttgaagcacaacatttgtgtgtgtgtgtgtgtgtatttttagtagagatggggttttgccatgttggtcgggcgggtcttaaactcctgatctcaggtgatccacccaccttgccggtgaaccaccacagcacccggcccgtttttggtttttttgtttgtttgttttttgagccagagtattgctctgttgccctggctggagtgccgtagtgccatcttggttcacggcaacatctggctcccgggttcaagtgattcttctgcctcagcctcccgagtagctgggattacaggtacacaccaccacaccctgctaatttttatatttttggtagagacagagttttgccatgttcctcaggctggtctcaaactcctgaattcaagtgatccacccgcctcagcctcccaaagtgctgggattacaggcgtgagccaccactcccggccagaagcacaatttttaatttttatgatgttcagtttatatttgtttttccctttgttgcttgtatttttgtgtgtcttaatatgtcttctaagtctgttttaatggatggattctccccttcctgcctctcatttatctgttgaagaattttgcctatttgacctgtagagtttcctatggtctggatttttctaattatgttcccatggtacagttcagcttctctctgtctctgtatttcctgcaaattggcagctacaccaagaggtgtgatcagattctgatgttcaagggcttttgtctatcttacaggcagtcagtatgctattatattaggagacacacaatgtgtggttgtgtctctgtgatattattttagtagctttgatgctgaatgctgattaggtcttcattggggtttgcaaatgtatgatagtctaattctgttatcatttgttagctgacaaacttttgtttaaattttattttaaaaattaataaaagcagggacaggaggatcgcttgagcccaggaattgaagaccaccctggtcaacatagtgagacatcatttgtacaaaaaattagaaaaattagccaggcgtggtggtgtcaacctgtagtcctggctgttcgggaggctgagatgagaggattgtttgagcccaggaatttgagggttgtggtaagctctgagcatgccactgctctccagggcaaaaaagaaaaaaaaaaaccctaaaaatagagcttttggggatatacagttctatgaattttaacacatctatagatataacaaactacaagtcattatacagagcagttcagtcaccggaaaacctcctgctatccctttgcagtcacacccctacttcaccccaactctggaaaccagcaacctgtttcctgtcactctagttttgtctttttgaagtaccctcttgagactgtgttatttagcattatgccttttgagggtcatccaggttgttgcatgtgtgaagagtgttgtccctttctgtggttgattatcattccattggatggatgtgccagttttttattcgttcacttttagaaggacttacgtgttgtgtccagtttttggcgatgatgaatagagctgctctatacattcatgtatacatttcttgcttgcacataggttacatttcaccagctaagtacctaggaatgggattaccagcatattcctacagtgctgtatgccttttagttctccagggaataggaaagacaagatacatgcttgttctctccttttactggcagtttttaaaaacagactgtttcttagagcattttcaggttcacagcaaaattgaagaagtacgaagagttcccatatccccccaatccacatgtacatagcctgccccactctcaacatcccccactagagtggcacattgtttccaattgatgaacctatgttgacatgtccttattacgcaaagtctttaggcttcattagggttcactcttggtgttgtacattatatgggttatattatatattaaatgcagagtgatgtctattcaccattatggtatcatagagaatagtttcactgccctataaatcctctgtgctttctgcctatttatcgctccctcctctcaacccctggcactgatctttttactgtcttcatagttttgctgtttccagaaatgtcatatagttggaattgtaacaattttaaaaataatgaatttggttccctatcttctctgaaggtgattttctttcctttttgttttttgaattgttatgaactcatttgttggggttcagtccattgtaattcttacacctgttaaagctcaaattgttcgtttttggccaagggcagcctcttctggtaggcttctgagtccttctaaagtgactcatagtctgtgatttgtcccctcactaccttataaaatgagactttccgggaacatcttttacaatttctgcctcacacctggaatatctccaagaagccttgggtttttttcagtgggaaatggtatttcaaaaccactgccaggactgttggggtgttctaatgcttattgctactgagttagtcttcgtttctaattctaagtggatagtgctgggaggtactaccctcggaatcctggttttcaaggacataggtgtggtagaatatttgataattactcgtttattttgtcacatattatgtctctgacagttacaaaacaacaatactaatatatccaccatgggttgaaaccagttaaaaccattctttgcatgcgctctccatttccccccattccctgtgcagttgtcttccatatatcaccagggcatgttgccattagaacgcacacccattatgcgcccttgtattctgttcctcttcgtccctgtgtagtcgacaggtaactatttagcgctcacctctattcctatgtcagtatccctctatctacatgggttctctcaaactcattttctagtagatatctctagaagggcttatgggaacaatattccctgagtttttgtatgttgataatatgtataatgtttatactcgaaagttctactggccataaaattcttggctttcattttccttccttgagtattttattttctggtataatatgttgctttggaaagtttgttgttaatgtagtttttttcccttataaattacttgatgtttttgcctagatgctcaagtttattttttccttaaaaatcctgcaattttactatatcttggtattgattattttggcccagtattttccagtatgcaatgtgtgccttaaatatgtagtttctaatttttttctggtgtcctggcatgtcatccaggctggcctctaattcctgggctcaagtgatcctctcgcctcagcttccccaatgctgagagtatgggctgcattagctcttttttcttaattttggcaaaaatttcttggattacagtttttagtgttgcttgttctcctgcttttgctttctccagggattcctgttatataagaaataggaacaatttttgttgctttctttagaatcctattatttcatcatttcgtttttggtttttagaattatcttccttcttactttcaatttctcgaaggcattatctgtaatattcattcttgtgttccttgggttttattcttcatttctcaaataaatttttaaatttctaattacttactgagtcatgttctcacatttctgagtttcttctgttctgatgttgtttttcatgctttatataattttcttaatgtttttagctcattttgaaatactaatagtaggttctaattttaatctcctttgtgtttctggccttctagcatgatgtatttgtctgtaaggaggatgttgttttgttgttttgttcccgattccttcactgtttttttttgtttgtttgtttttttgagacggagtcttactctgtcgcctgggctggagcgcagtggtgctatctcggctctctacaacctctgcctcctgagttcaggcaattcttctgcctcagcctcccgagtagctgggactataggtgcgcgccaccatgctcggctaatttttgtatttttagtagagacagggtttcaccatattggccaggcttgtcttgaactcctgacctcgtggtctgccgcctcggcctcccaaagtactgggattacaggcgtgagctaccatgcctagccccttccccattttcttataataacttctatgagatttggatctgaaaactttgccatgggtcagttttattggaagttcattttcctgaatgtttggaagaaagcctagtgactcaggatagcatttctaatttcacagagttatttttccgttatgaaacacagattgcctttgaggtctcctgtttctactactgcccctcacttttatgtgggcctcctctttcctttgtttctggagaaccttttcctgttcaattctgttttaattttcagcagttttttttctgtgtgagtgaggctgtttcctagcagggaggtctggttggtcattttcaagttcatcagggcttcatcagggcttgtccacttcaacccttacgctataggccctttgcaccatctgcatcttcaaatgtgcccactgttcgttccaatgaagacttgtttgttatttggcttgtagagggacatggaagaagcaaatcagtctttacctctctcaaggctggagatttgcaggcactggttttatctgtaactggagatgagagttcaggccaaacactggtttaaaaatctgtatatgaaatagcgataccctggaatctaggactgagatcctgtgcctcacacccacccacgcggccaagtgcctacctgtggcagtgacttcttagtgctcgtccacatctaggtcttctttagtcccaggctgatgggaacatttaattcctttgctccttgatgttagatgggatcaggtgactgatgctggccagtggactttgagggaggttgtgttacttctgagttggcatagtgaaaagcccatgaagatgctctgctctctttcttgcctaggatatccctggtcataggattcatttgatgcaggaacaaggtggtcagcctggctctttgaataactggaaatggcccctgcatacccgtgttggacatattacatgaggcagaaataaatttctgttgtgctaagccattgaaatgttggggttgttaccacagcatcacttagacctgtgctgtctaacatggcagccactaggctacatgtggccatgagcacttgaaatgtggctagtcctaattaagatgtgctgtaactttaaaataatactatatttggaaaaaaaggtgtaaaatatcttaataatttttatattacatattaacatcttgtattcattgggttaaataagatgtattgaaattattttcagctttctctttagtttttttcatgaagctgcttagaaaatttaaaattatacacgtggtcacatttgtggcattatccgcagcactgacccctaccttagtaattcagtacccctccctcattttgacaaaagctggtcagttgattgtcagagaaactgaatcagtgaaactccagatttgaagagagtacagaagaggagtacactacagatggggattaagcgaaagtcgacctactggatcaggagatacacttccttgtctttaatttctgtccatgtcctttttccacttgtttgcagagcactgacaattggagttatacacttcacctaggagactgaaggactcttttctaagaaatcgaatggcttcaggaaagagatcaacagagcccgatatttaaggctctccgtatctgcacaagcaggagttaccctgcagtaaagcctgctagttcacaagcctcacctacatgcagagagggtccagttggggttgacgaaccactctttatgggaacagcacccaagatacaccagacactggtggaaaattctaacaggaattaacttgttaagggaaagataataataatatgagtctatgtgcatattatcagtgatctgtttgcatattaaataattcagataatgaaagtacaagtgaaaaaatgagtctttgcgataaagctcttctccagccatccccatttctacaatatttttttccaatttttaaaatcaaggtaaaatatacataccccaaatttatcattttaaccatttttaagtatatagttcagtggtattaaatacattcataatgttgtgcaaccatcaccaccatccatctcccatactcttttcatctggtgaagctgaaaatatactcatcttgtaaagctgaaataacaactctcccttcttccctttccccatccttggcaaccatgattctactgatgtctctatgatcttgactactaagtacgtcatataagtggcatcatttagtatttttctttttggtggctggcttatttcacttagcataatgtcttcaaggtttatgttgtggcatgtctcagaatttccctcctccttaaggctgaacaatactccattgtatgcatataccacattttgcttatccattcattcatccatggatacttgggttactttcacattttagctgttgtgaataatgctgccattaacgtggatatgcaactaaaagagtactgtaaacaaatgccaacaaattggataacctggatgaaatggacagattcctagaaacacaaaacctactaagactaaataatgaagaaacagaatatcagaatagacctgtaactagtgaggagattgaatgagtaatcaaaaatctcctgacagaaaagaaaaaccctggacctgatggcttcactggtgaattctaccaaacatttaaggaaaaactaataccattcttcaagttttcaaaaacaaaaaaaactggagaaagagaaccctttccaactcattctatgaggccaacatcacactgacaccaaagttagacaaagatactacaaggaaactacagataatacttcttaggaacgttgatgccaaaatcttcaataaagtactagcagagtttcctctaatattttaagaagtttgctgaagtgtgaatagttctttgattaatattttttcgagacggagtctcaccgtgttgcccaggctggagtgtaatggcatgatctcagctcactgcaacctctgcttcccgggttcaaacgattctcctgcctcagcctcctaagtagctaggattacaggcacctgccaccatgcctggctaatttttgtacttttagtagagacagggtttccccatgttggccaagctggtctcgaactcctgacctcgtgatctgccctcctcggcctccaaaagtgctgggattacaggtgtgagccaccgtgtcccgccagctaataattttagggagcagatgaagaggtcttcagactgcttttagctcaggtttttttgttttaaaatttattaagtggaaagaaacatgttaactgaagattgaagtttgctgaagtatgaatagttcttcggttaataattttagggcgcagatgaagaggctttcagattgcttttgtctcaggattttttgctttaaaatttataaagtgaatggaaagaaacgttaactgaggattagtgctagtttttcttgacaggtcatttcctatagggagggcagtagtataagcaaaacaacaaaatattcaaaattctcaaataagtactatttattattgaaaaactcagataaatgtagaagttattttttctctctattgagcagcagttacatatgctagaatcatagtttgaatgattcagactgtgtacctgtgatctgacatacctggattggagttccatctctgccacccactttatttgactccatagagaaattactcaagccccttaagacagacactgaaataggatacagtttccaagaaggcaagattttttggatttttttgttgttgttcattgctgtatgctgaggtttagattagttcctgggacacagaactagcagtcagtaaatacgttgaatgaacccgaagaattcctgcctccgaattgttttggggatgaaatgcggtaatgcatgtaaagcattgggcatgcaagtgaagccagccacgtattaaacagtactcagctcttacctctgtatcttatattcttatttccgtgactgtatcctcacacatgaagaaatggctacttatttattattattattactattattattgctacttattttttaaagccacttacatctctggagatctctgtatgtgtgttaaaaataccatgttttgtaacaattggcttgtcttagaaaacttttcaattatacagaatttgagatctttacaacttgaattttcttttttttctttttgagtctcgctctgtctcccaggctggagtgcagtggtgcgatctcaggtcactgcagtctctgcctcctgggctcaagcgattctcctgcctcagcctcctgagtacaggcacgcgccaccatgcccaactaatttttgtatttttagtagagatggggtttcatcattttggccaggatggtctcgatctcctgacctcgtgatccgcccacttcggcctccccaagtgctaggattacaggcgtgagccaccgtgcccggccacaacttgaattttcatagcaaactagtttttattgtcaaattagaaatttatgcttgaagcctagtgcttcttttgcctatgcatctcatctaaaagtaatggcacttatcacgtcagcctcatggattgtggtagtggttgttatccttggaattaccggtagggtaacagtctccaggcataccatgggttcttcagttatgagtggcatagcttatgtacatgttaactgtgaataataaacgatttttccaacttactgcaatactcttatttatgtctgtaatgtgaattgtccagaggagaagttgtggtcaattgatgattaggctgatggtttctgctagctctggcaaaaggtgaatccagttgctttctagcacttttcctactaaccctgcttctcaccctgtacctaataccacatttttagtttagtttttgttttgttttgtttgagacagggtctaactttctgacacccagactggagtgcagtggtgtgatcatagctcgtctgcagcctccacctcccaggctcaagtggttctctcacctcagcctcctgaatagctgggactacaggattatgcccccatgcctggctgtttaaaaatttttgggtagagatggggttttgccacgttgccatggctggtctcaaactactgggtttaagcaatcctcttgccttggcctcccaaagtgttgggattacaggcatgagccactgcacccagaatcacctttttttagtttggaagatgacatctttttttttttttttcttagagaagctagagggtaccaaattaaagtctgtcagttttttctgtctccacctcaaagatcactgtatgacttcttttcttccttctcggctgtttcacacgaagttttccctttttctaaggctcagtccttatcgtctgagacctccctctcattatccatctctccatccttgactgtttctagttcgattgtaacactgatcaaatctccttcaagttcaaaacaaaccagcaaaaccttcccttgatactgccattacctcagagctatgtaccgtgctccttgccctccccccggacttctccggatgctagttgatgcctgtttagcacctgtcactgtttcatatacttcttactggccactgcctggttggcatctaccacttctctggaatcagcaaccccaatagcagatttaactgctggttccatggtttttgttacttgtccttttttgcagtgttttaaataataatcatcttttcacttatttttttaaagaaggtcatttaaaaaaatcatcctgcagtggaaaatttggaaaatatggaaaagtataaagaagacaattatcaactgtaataccagcagtacctattgttaagctctagggcatgtcatttccatcgctctctttttaaatgcattaaacagaaaaggatcacatggttattttgtgatctgattttttctatcttaatatattgtgagtatatttccaagtacttattctcgtgtggcataacatttgtagttacacgaagtggcggtgttgagactgccttggttcaaatcctggcttcagttactgctgcagtgtgacctgaaggaagttactcctctgggttttagtttcctcatcttgaaaatagttataacattcttactaacttctagggttgctgtaagtattaagtgagctaacacatagaaataattcttggcacttaataaacatcagctgttattaacaatattgtctgactgtactataatttacattatttttgtttttgcttgttctgccgtcattaagcgtgttgtaagaccatacgtgtcactaaatctgggtgcacaacatgattttttttaaatgtggatttttattagtaggattgctcagctagtgggtacatcatgctcattgctaagttgctctctagagaggctgcatttatacctcccaaggctgtacaggagaccattaacttcattacatttttccaaaaaactttatgctattgcccacattttgtgctgctcccttgctaaaagtgaataacaatatgatcatgttgttacctctctcttgccaaaacgttgacttgatgataaggggatcactgtgacatcatcattacccacagatgtttcttttttctcccccctccccctctcttctccttcctccctccttttgtttcttgagacgggttcttggctctgtgcaggctggagtgcagtgacacaatcatggctcactgcagtctggacctcccaggctcaagtggtcctctcacttcagcctcctgagtagctgggacagcaggcacgcaccaccacacccagctaatttttgtattttttgtagagaggggttttaccacgttcctaggctggtctcgaactgcatgttcccaggctggtctcgaactcgtgggctcaagcgatccacccacctcggcctcccaaattgctgggattacagacccgagccagcatgcctggcctcacagatatttcttgatctacattttattcattatttaggtccaactttagcatgtgtcatgtatttatatacaggttctaaatctttccatttgaaaaatactcatttttctatccaaaatgaattcaattttcctttttattctagtcccagtctgtgtatgagtaaaaccccaaggaccctgtatcctgattttactattttttgttaatggtttgaaacagctttattaagatataattcacataccatacaattatttaaagggcacacacttcaatggtttttagtatactcacggatctgtacaaccattatcacagtcatgggcaattggttcaggatttgggaagaaaacgtatggcattaggattaaaagtacaatgtttagagtctggctgatctgggtttaaatcccaaatctaccatgtattaactgtgtgactttgagaaggttacttaatcactatgagcttcagttttctttttttttcccgtttttatttttatttttatttttattttgaggcagagtcttactctgtcacccaggctggagtgcagtggcgcgatctcggctcactgcaacctctgcctcctgggttcaagtgattctttgcctcagcctcccaagtagctgggattacaggccaccatgcttggctaatttttgtatttttagtagagatggagtttcaccatgttggccaggctggtctcgaactcctgacctcaggtgatatgcccgcctcagcctcccagagtgctgggattatagatgcaagccactgtgccggcctgagcttcagttttcttatctgtaatatgggattactagtggtatctggctcataggcttattttaaggattaagcaagataataaatgtatagaatttagcacagtaaccggcacatagtaaatgtttgataaatggaactcggtaaatattattgccataattttgttcttaaatcaaccagcaagtgtttgatgctattattaggcaatgttattaaataatggaaggtgtttctaccagtgattcacagtgttttctgtatccagcaagcttttaatacagctgcttgtattattctcccgtataaacttctaattactctctgaaaatacagttggtttcctgttgatagagaacaataacagtagcttacacttagtgcttactgtctgcctggcactgttctaagtgccatacctatattaactcctttgatcctcattttacagattgggtacggaggaggttaaacaacttggtcaaaggattacaacagttaagtggtggagccaggattctaaccttggtattcagtctggctacagagcccatgctctttcttatctttatgttcttctctttacttcctaaagaatggtagatgcatttcaaacatcctgacatcttggctgctgaggattctgtatggaaaagcactatgaggtctttaatgcttggttggaaggagaactaaaatgagcagttgtgtgtgctgtgggcatgggccttagggcagctgtatatttgtcatctggatcagaccatacattggtgatcctgcttcacaaccatagaatccagaccctccatggggccatgaccagccacaaagtatcctccctgaccctccctgtggaatgctcgtgtgaacttgcactactccctccttgcatagtatcaaatcctgcggatccttggaaggccaccttaaattacttcccacctgtgaagcagtaaacgttagtgctcttcggttaatcatcatgtgtggtggtatgacatttgcagtatcatctgttaccattatttaaatttgaatatctttatgtcttggctcctcatgttgattacatgtttcttgcaggcagggaactatgtcttaaatgttttaaaatttgctttaatggcccctggaaatattaccaagggttgtgtgtgtgtgtgtgtgtgtgtgtgtgtgtttctttcagtctcacttgtctgtcgataatagaatatctctgaaattcaaacatacctagcctcacaaacttagtcccaaaggtacatgctgtgtttttgcaagaaggtgggcagtccctagttggctgttggattatgtgcattgtgttggggtagtagttgctgctaattgcctgtctgcagctcctcagaacctgttgttgcttccttttgaaaccttccttgattgccctagttgctgctcatcctgcatccaggcccctcccttaggcatgtgactcacggatttaaaagacagtgctgtacggtaattaactacctgcctctcatcacacagagatgagaacttaaatgtaggcttcccatctaaaactttcttccctgtgtgtttatccacccacggacatggagcagcgctgtcccacacctggccttttggaggaaatattgctagacttatttctcctgtttgaaatcactagttggcatattcgtgtacaagggatggattttacatgggtgctcttaattgaaaataattttattttctgtaacttctagaattttgttagtttattgatgcacacatattgggtgggtgacagttgggttttttatgaagataattttaagtttttagtaaataattaagtcaagtattacatgacagtttaattggactaaattctgacataacctatacatccttaaggtgaccggtggttatcattttctatgaaatgtaattagtttttcaggaaactttgtccacataaaggaattgattccacccttactacctgcttagcaatcctgaaaaatattgtaaatataatcttagagtatgcatcattaggaaataaatctattttgagaaataaattttaacgtacactattaataggacatttagaaatgtaattttctaaatatattagaaataataggacatttagaaatgacattctttttttttttttccttgctttttgtttgtttgtttgttttaagacagggactcactctgtttcctaggctggagtgcaatggcgtgatcattgctcactgcagcctcaacctcctgggctcaagcgatcctcccacctcagcctctgaaagtgctaggattacagggttagccaccagcacccagccaagaaatcccattctaatgtattagtatggttttatctattttagcagtgtaaaataaagtctttgtgaattatatatagtataattgaattgccaaaataaacatccttgccctcaaattgcttatgatattgtttctgaagcacagacataatcttttgaccttttaagcaaaaaattaatttttcatttaactttttttgtttgtgtgtgtgtgtgtgtgtgtgtgacagggtcttgccctgttgcccaggctagagtatagtgatgcaatgatggtttactgcagcctcaacttcccaggctcaagtgatcctcccacctcagcctcctgagtaattgggactgcaggcacgtgccaccatacttggctaaattaacatttttttgtggaaatatggtcttgctatgttgcccacactggtcttgaactcacgggctgaagtgatcctcctgcttcagtcacccaaagtactgggattacaggtgtgagccatcgtgcctggcctttcattcaacttgtaattcacaatttccagaaaaaaagttttaaaattactgatggaggaaagatctttgggacttgcttgtaaatatgttaatatttgatcttaataagctctgtcatactaacactgtttattaaactttgtggtagaattactacccataactaaagaatgaaatgcatatatttgcaaattgttaaaaatttataaatcgatagaaaagttgaatgaatagtgaacacccttgtgtctttcactaactcagtggctcacttgctaacgtttgcctcatttgctttctctgtttataaagacatatatactttttttattcccctgagccatttgaaagtaagctgcaaacatcttgacatttaacttctaaacattttagcacgtgtatcctaagagcaaggttgtcttcctgaagagttacattatcatacttaagagatatagtattaatacaatattatctaacatgtgatccctatttaaatttcatttattttcttccccagaacagttctttatagatgttttaatttttgatccagaaaccaagggaaaaaatatatctatatctatagagagctaaatagatctatatttgatccagaaaccaatcaaggaaacacacacacacacacacacacacacacacccgcttttggctgtcatatttctttagtttcctttactttaggataagccactaccccacctccatctaccacccggcagtggtcttttatgaaatctcatcatatttttccttttcttatataagcagtcccacaatttgctggttatatttcatgcctagattaaaataagaatattttggaatgaatatactatatagatggcattaattttccattatattacattaggagaagtaattttttttacatgttttttttccgctgtataatagtttagtatttgttttaatatacttctgttaaagatttgtgatactgtgtctttaaatttcaaaatagaattttgtaatttactcttaattttcttagtatgttgtattccaaaattatagaaagtgctataatagacatttatgtacattacataaagtaatagacatttatgtaatgtgggcatagatttaaattttttttaaattgttaaaatattaacatttaaccatgtctgctttagataggtttaatcttacaaggatctatctacttatctttctatctatttataatgtatatatccattttaaataataataacaatacatgaataaatctggtccaaacttctatcttgagaaatgtaacagcaattttgaactccttcatccctcaagacaattattcctcccttcccagaggtaaccatcctcctaaatttgatgtcattcccttagttttttcttaagttttaccacatttgtgttgtccctttaacatacttttttttttaagcttttcctgtttttgagctttatacatatggaattattctgtatatattcttcttgggcttgatttttttatttatattacaattttgagatgtcatttatgttgacattgttagccgaagttcattaatttttcactatttgatataatattccaaattactggaatatggaatattctatgaatataccacagtccattttactgctgcttgacacctcggtttcacctagtttttggtatggaaaaaatactgctttaaatattcttttgcgtggctcatggtagctaagtacaaaaggttctctaggttatatgcatagacctggattgttgagtcttgggtgtatacaccatcagctttactaggtatggcagaatgtcttcttttacacagttgtggaataagccagatgagttcaagaggagcaagtttgtgagaggatggacaagtgagttagtgagttacatttcatttgttttgagttttagcctatttagttagaaatgttaagtaggcatttgagatgtgtttacttttttagctccacccatctttgttttttcctaggttgactcattcaggtatgtcatctctcccttctccttaaagtggcctttaaagaaaaaagttgcaggccgggcacggtggtttacacctataatcccagcactttgggaggccaaagagggcggatcacaagatcaggagttcaagaccagcttggccaatatggtgaaaccgcatttctactaaaaataaaaaaattagccgagcgtggtgacacgtgcctgtaatcccagccacttgggaggctgaggcaggagaatcactggacctagggaggtggaggttgcagtgagccgaaatcgtgccactgcactctaccctgggtgacagagtgagactctgtctcaaggaaaaaattgcagtatcatggtacaacaattacttgatcgtaatagaagatgtgttcagtttttatatcttcagtctcaggccatccgtcatatgcagcctttttgtttttatagaccttgaaccacagaactacattaagctagtttgctgttttccagggatgacataaaggagaagtgggtagagggtgatgctgttattagcaagtgtgcattccaggtagcggttcacaaaggggaaaaaacgtaaaggaaagacgggtgcaagctaaaacaaataagccagtaagtaaaaaaccacaacactcttttgtgattatttagatctgaaacaaatagcagcatgtattaatagtccctgatgatttcactgtattgtagcataactctggtattcataatgtcaattctgaatttctttatgtgttgagagagtgtaatcatgctgattttagcagatctggtgaacccttagcaatctagaatcactctctgataattcctgaattaacagtagaaatttaactgttttatgtggtgaaattattctaggaagcttgttccatgggacatttacctattagctaataaaacaaatggtctattgataatttctcaaaagctctgtataaaaaaaaaatatatatacaataatttctctactggccgaattggatttacttggaaaaagaaagagggtgttatcaaaaaatttaaatgtcttgttaggttcgtaagttgtagaacaagaatgagaatgtgcaagtgtttttatgcttcattgttgggaaggataaattgcaaaagaacatagagctgggtgattttctggggttcagtctgttgcgggtgccacagattggcactcccctcggaattgccacaccttcacggagccagaacaggagggatacggagggaaagggccctttcccaacttcagactgagcacccagaagttgacctgggactgctgttttgtttctaggaaactagaaaccttggcagaattgaaatttcgtagtgattttttcttctttgctctccaaaaaataaacttgtatgtacacacatatgtatatacactcacacctacataaaagaaagataatttcaaagaaataatatatctcgtatagtccttgaacagttattttactattcaaagtaggttcttcaaaatttttaatttgaaataactaggtttacaggaaattgcaaaaaatagtaaggagaggtcccttgtgcctttcacctttcccttaatggtaacttcttactacccacagcacagcattaaactagaaattgacattggtacattttatgtgtttagtgctgtgctgtttaaacatatatgtagttgatttgtgaaccactgtggcatcaagacacaaatgctgccaccaccaagctctcccttgtgctgcacacacctgccccatggcagccagtaatctgcttttcatctctatgatgttgacatttcgaggatattaataaatggaatcacatagtatgtgaccttttaaaattagcttattttcacttggcgcaattccttgagatctatccaagttgtgtgaatcaacagttctttcctttttattgctgaataggattccatggtttgtttaaccattcaccttttgaaagataatctctttccctagtttttggcttttaacagtaaagcagctgtgaacattcatgttcagttttttgtgtggacataaatttttatttctttgggagaggtgctgttaaagaaaaaaaaattattcagtgacacttgttaaagcatgggaaggaagacattattcaggatcatccctgtaagtgtagggaccactacaatagtgtcttacagtgggtggggagagagcgtggcctcagtgctggatgtagcatggggaagtgggaatttgtagccaaggagctggttgagggccagtggatggaaaattctcaagaggaaatgtcaggtgtaaggggtttctgcctaaactgaccgtaacaggattctttcttgctgaagacaggccaaggtgatcagacatcagctggagggtggcagaagaagaagagggtaatcagacaccttgacgggaggtttgctaatctggcttagcagggttctttgctaaaacaggaatttacaaggaagtacacagataggcctgggagaaaagttcaggagcctggctcatttggtcaagcaaagaatctttgccagagcccaggggtgtgcagttggtggcttacctgtaagtagctgtgccattttacatgctcactggcagtgtatgagagatccagtttcttcacattcgtgtccacatttggtgttgtcactatttttttattttagctgtgccagtaggtgtgcagcatagtttggtttgcgtttccctgatgtctagtaatgttgaccatatcttttcatgcgcgtatttgccgtctatatatcctcttcaataaaatgtctttatatttcttgcccattttctagttgaaatttttttcaattgttgagctttgagatttctttatatatcctagatgaggcttttatcacatatattgttagcaaatatattttcctagcctgtacctcatttttttgccttcttaaacaggtcttttgtagagcaaacatttttaattttgttgaagttcagtttatcgtgtttttttttctttcatggattgtatttttggtgtcattccccattccccattccccactctccagccccagacggccacgaatctactctcggtctctgtgaaattgcctattctgaatatttcctataagtggaatcatatgtctggcttctttcacttagcatatattcaggcctcatccctgttgtatcatgaaccagttctttttatggcttcgtttatttttaaggttgaataatgttccactgcatggataagaccacattttgtttagccatttgtcagctgatcggcaattaaggttgttttcacttcttcgtctgcatcagtacagctgcatgtgtacccttcagccctgcaccttccttatacacgatgcacagatgtacgcatgcgagtacttgtgtgtacggttttgttttcttttttaaataatggaggattaacttattttatagtttttttcttcgatatttgggatgtctttttatgtctatataaaaagatatatctcattattttaaatgactatgtagtgtttaatgtgactgcttaattgatcctattctaataaacatttagatgacattgggtaacttcttgtttttcttttttatataacagtggcaccaggcacagtggtttatgcctataatcccagcactctgggaagccaaggcagaaggatcacttgagcccaggaatttgagacctgcctgggcaacatagagagaccttatttctacaaacgaacaaacaaacaaaaaattatccaggcttgttggcacttgcctgtagtcccagctactttggaggctgaggtgggaggatcacttgagcccagtaggtggaggctacagggaattaggattacaccactgcactccagcttgggtgacagagcaagaccctgtctcaaataaaaaaatagtgacactaatcatccttgtacaagtgtcttttttggtgcatagctcattttacctacttttggatttttctcttcaatgccatttgtcattaacttatttagaagtgtattgattacctcctataggccaggcactgtactgtgtatcagacactagggacacaagcactagtaaaatgctatggctatactcaagttttttgtaaagatgatatacctataagtaggtaatcatggttcactgtgataagtgcacaatgtgttattactagaatcctgtggaacgaactgtagcagaaggtaaggcaggttacgttaaatagattgaaaacagattatagcagtctgtgaatgcccttctaatgaatttggacttcattttgtacataattagaaatcattgaaaaaggccgggcgcggtggctcatacctgtaatcccagcactctgggaggcctaggcggttggatcacgaggtcaggaattcgagatgagcctggccaagatggtgaaaccctgtctctactaaaaatacaaaagttagctgagtgtgatggcacatgcctgtagtcccagctacttgggaggctgaggcaggagaattgcttgaacccgggaggcagaggttgtggtgagctgagttcgtgccattgcactccagcctgggcgacaagagcgaaactccgtctaaaaaaaaaaaaaaaaagaaatcattgaaaaaatgtaggcacacttaaattttttaactttagtaaatttttgtgctgtgactgttttagaacactttatcacctcccacaatcactgccttctacctcctcatctaggcaaccactgcttattttctgtctctaaatttgcttttcctaaacatttatgcgttggaaacatacagtatgcagtatttttacattggcttctttcatctagcgtgtctttgaggctcatgtatgctgtaatgtgtatcagtattttgtgcctttttactgcctaatgatattccattctgtggtgatgacaatttatgtgctcagcaattgatggatgtttggattgtttccagtttttggttattatgaacaaagctgctatgaacatctgtagataaatctttgtgtgggcacatatttctcttgggaaaaggaaattttggatcctgtgataagtttatatataactttaagaaattagggcatggtggctcacgcttataatcccagtgactcgggagactgaggcgggaggattgcttgagctcaagaggtcaaggctgaagtgagccatgattgggctactgcactctagcctggacaacagagtgagacctcacctctaaaagaacaaagaaaaaaaatttacagactattcctcaaagtgactgcatcattttacagtcctgtcagcaatgtatgcgggttccagcttctccagatgctcgacacttggtattgtcttttgattatggccattttaatggctgtatagtgtatctcattgtagttttaacttgcatcttcctaatgacagggtgtttataatcttttcatgaagcatagttatattttagagacatgagtccaatgaatagaggtaagaatggaggtgagctacatgaaagatgagagcctacgtcagacaatatgtgtagagatggggagacattttaaagatacgtgtatcagagctagaatgagcagcatttagtaactcctgagtataatagatgaagcagagggaggtggggcttgtgatcccaagattttaaacttcggcaattgggcactttttggctaacggtgctgccattagccaaaaagtgactgccggtacataaacagattttgtgctggtggttgatggcttttatattgatcttattctcttgatgtgccactggaataaacatttaatagagtgtttggaaacatgtatctagttcaaaagaaggatctgggctgaggtataaatttagggcagtttacattgtgtagggaacaactaaattcatggaagtaaatgatgtatctgttcctaagtcaccctatctgctgagttacttgtgacaaattgtttaaacagtaaaagaatttaatatgaaaagatacacgttaagatgattctaggattaattcattcaggcatgacagcatcaccaaggacccaggttctttctatcttttaatgctgctgctgttcttgatctgttgggttgtcctcatggtccagttcttgtttacacattcaaacccagaattgcatgcaaaaaggctgggagcatgtgtttttacctgggtcttttttcatcagccaagaaaacttttcctaaaagctccctagcaaacttactttcttgtcttcttggccagaattgcattaggaatgtgttaccagactacccactggcaaggggaatggaaattgtcacagttggttcagaccagagctttctagcccaagtatttttttctgttatctcttctggaagaagccttttccccttgccttttgagtctcttctgtagttcaggtaagttagattttctatgcaacccagttttgtatcattgagttgttactattcaatacttcacaacagcaaatacttgccaaaatcctacactgtgtcatgctggattctaggatacagaaatgaataagaaacttgtagtttgacatagatacaagcttaaacagaagagtgctatgatagatttgtacactaaagttcttttggactatggatttagtacaactgtttatatgtttggttttatgagtaaaggcatcttgagtttcaaaatcaaccttatattcaatttataaatgaagttttggaaatttagaacgcaacccattcatgagttgaccctccctttctagttaggtggttacatgtttattataggggtgcatggtatactatcctaaagtaactgttcatttgagttatttacagctaaaaccacattatgtttttctggagcataatgtttgtgttttctagttatcgtaccaaagtaaacagtaatatctttagcttaagaacccaactgaaatgtttgtaaaatatagattgttttgtaatttggctctttttttttaatggtcctatgaatgcaactatagtgtttgcagtatttgtacagtgcatggggtgctttttctgggtgctgagaagggaggagaaatgatagggaagaggggatttggagtagccgaaggaaaaaatgtgcaatcagtgttgttgattccaccgaattctaagaattccattacatcttgatatctggtacaagctcaaagttaatcttaaattttggcttagggcatggccgtacttgctggctacttgggaggctaaagcaggaggatccttagagcctggaaggtcaaggctgctgtgagccatgaccgtgccactgcactccagcctgagtgacagagtgagaccctgtctttaaaaagaaaaaaagaaaaaaaaaaaaaacagaaaaaaaacaaacaagtgtccaggagtggtggctcacgcctgtaatcctagcactttgggaggctgaggcgggcggatcatgaggtcaggagttcaagaccagcctggccaacatggtgaaaccgcatctctactaaaatacaaaaattagctgggcatggttaatcccagctactggggaggctgaggcaggagaatggcttgaacccaggaggcagaggttgcagtgagctgagatcgtgccactgtactccagcctgggtgacaagcaagactctgtatcaaaaaaaaaaaaaaaaaaaaaaaaaaaaaaaaaaaaaaaggtgttttggcctagattgagtaaaagaatatttacactattcttttctgtaaagcaaatcttactaataatagaaatcagtgggtgacattctgaaaccttatagataactgttatgatatccataatcagtgcttgtccttggattctgcatgggtagtgagctttaaagtatcttgttggtttaagatttaaccattttaataattttgaaaaccaagatggatgcatacattctgatgacaagaaaagatgttttgtaagggaaatgtggaattaaaatgaactttttgtgtttgtttgcaaataattattaatgttgaagaaattttgatgttagctctgagttatgaatgttagaatatatttagaaatgtttgattttcatttttccatgtcattaagaagcttgcatatgttttttaaagaattgccttctttttaatgtgttttctacaactaataggcttagaaatttcagacacaaaatctttgaaaaaatgacttgtacttacttagcgttttgttttgactaacacccctggtggttgttgaaccacaagttcatagtgttaaaagcctgtggtaaattacccagtaagctaagtgattaaagttgtttggaacattttgctcatgtacatcttatttttatgtgtatacatatttatagatctgtgctcataggactatagcactatattgcaaaggtcctaacctttattcacacaacttccagtgtgtacaatgtgacttgcagagctgtactgtggagcatatcctttcctgtgtcttttgtttacctctgagtaatgaagtcaaatcttacttgattttccttggctggtctattttattttattaagttctgggatacatgtgcgggactagctagtcttaaattcagtctttaggaaacgttttctgggctgggcacagtggctcatgcctgtaatctaagcactttgggaggccgaggcaggcggatcacttgaggtcaggagttcgaaatcaggctggccgacatgacgagaccctgtctctacaaaaaatataaaaattaacctggcatggtagtgttcgcctgtagtcccagctactcaggaggctgaggtgggaggattccttaagcccaggaattcgagaccagcctgggcaacacggcaaaaccccatgtctacaaaaaatataaaaattagctgggcatggttgtatgtacctgtagtcccagctactcgggaggctgaggccggaggattatttgagcccaggaggtggaggctgcagtgagctgtgattgtgccactatacgccagcctgggtaatggagccagagcctgtctcaaaaaagaaaaagaagaaaaggttttctgaagtttatgttaagtgtttgtacatgtgggaaaacagggaagaacagatcatctggggttttggacttttgaagatgggatgtttgaaagctcttttggttatgttattcgctattttttaaactttagatttagcctgaagcctaaaacttttagccaaggaaacaatgttttagtaaatggtgctgtaataaacaatagttggtaagtagtttacatgttaattttataatgatacattggaaatatctggcagaattagaatcaggctgtgtgtgtgtgtgtctgtgtgtgtgtgtgtgtgtgtgtgtgtaatcaggctggtctcgaactcctgacctcaagtgatccacccacctcagcctcccaaagtgctgggattacaggcatgagccactgcacctggccaggccatatatttttgaaacagacactttgatggactgtttttacttttatggggataaattcatttgaactttgtttaatacagtgattgcctgctctctctcccacacccttagggaagaatggtgtagttggcaaagaatggctttggaggaaaatctctttatgccatttctaaaatggaaatagtgcatttcttttcttgattagtaaaagggaaattaaagattatgagcatctcagaagaacactgaacaccaactctttatttttgccttccctcatttctctgagcgacagcctgagagttttatagtcatatgaggactctgaaaaatgttagagacctggctaagttgtaggtaactagtgcattgagaagactgaaaggctcctgaatgcagacaaagcattactaattgcattcagggtcaggctgtctttagccggaccatgaaagatacagcagcctgtctgctgagcggagactcttgtctttaagaaagactgctacctgatatgctagaccgtttcaggttgccctagtttacatgaatttagtcattatcgccaagactgctaaacctcagtgtgatacttctaaatggacttgaagacaaggtatttgaccttgcaatggggcataggcaacgttcatacagtttttaaaacacgaaacagaatactttgctatttgaagtttccgttaaaagattgaatgatttttaagatcgcaaagtaaacagcagacatacctttagaaatttttttatgacttgaacccaggaggcggaagttgcagtgatccgagatggcactactgcactccagcctgggcgacagagcaagaccttgtctcaaaaataataataataataatttaagctttaatagttctatcttttagatttatgaatgcttgccccttaaagggtaaggtgttaatagcagtactaatatacggtagtttagacctattccacaggcatagaccaaccagtgcaattaattcttcaacctcacaagtcctaatgttctaggtagaagtgtggctgaaattaaaactggttattagactttgtaatacaaaagtagaaaaaagtgatattagctaggtggtccaatatatttttgtctaagtaggaatctgaatattgtagaattgtacatttcggtgctgcttctagctattcctgttcttttttttttttcaaattgagatgagttttttttttttccatcaaagcttaagataacataggaattttatatggaagtactgttcccacagaactaactttacaaatgtaaagcttgggcagaggttgaggaaaatggtaaagtgatagatttcgtaaaaactgtagaaattttcattgactttactttgaaaatgtatagttgtacatgcgaaacgcttctagtattgcttctagatgtattattctgacaaagttccctaagtcttaaataagttctttttttttctaaacagacttatgaaaatatgcatcagtttaatactgtcttggaattcatgagatggaagcataggtcaaagctgtttggagaaaatcagaagtacagttttatctagccacatcttggaggtaaggaaaagaacataatttagaataatatgaaatttctcattttttaatagttgaaaataatccttctacactgcaactttatttgagccttcttcagtttctttgtaacaccacaactttatagtagcttctttagtttccttaatcatcttcctgacgagttcataagtaattctaatatatattcctcataaatgttgaacctcttcaggagtgaaaggtatttatttcttactaatcactttcataaatctccttttagaagataagcattaaatggtttatatgtttatttcttccccctaagtttgcaaagcagagttcagcatgcaagattaggccaggtgtgcctgtaatcccagcactttgggaggctgaggcaggtgggtcacatgaggccaggagttcgagaccagcctggccaacatggcgaaatctcgtctctactaaaaatgcagaaattagctgagcatgatggcctaagcctgtgatcccagccacctgggaggctgaggcatgagaattgcttgaacccagaatgcagaggttgtagtgagctgagatcatgccgctgtactccattctgggcaacagagtgagactctgtctcaaaaaaaaaaaaaaaaaaaaagattatattgaaaaatgaatgtttatgttattctgaaatttttacgctttttagaattcagaattttttttttttttaagacaggatcttgctttgtcacccaggctggactgcagtgagcatagtttcaactccctgggctcaagcgatccttctgcctcagtctcccacatagctgggactacaggcacacatcaccatgcccagctaatttattttttgtagaaacagggtctcattatccctctgtgttgctcaggctggtcttgaacccctggactcaagtgatcctcccacctcaacctcccaaagtgctgggattacaggcatgagctaccagacccagcccaggataagattttttaacatgttagaataatagatctttggaaatagaatttaaagaggtaggagctgccatcatgccagaaataggaggaaagaagccatcctaagacagtatgtacaggaaaatcaggcttactgttttaaaatccatttagagactaatgatcaggtaaaaggtttgaattatgtggggaatctacattttaagaaatagatagaatgtatggttttatgaagtggtctacgcttacacttctggaagtggcaggctttgcttgctgctactgttaatacttgcagcattcactcgcccttctcctgcccctgccaaaccgctggattagatcttctaaaaaataacgtaactctcgaattcttttgttaggtttcatattgtttgattggtagagttgtgatcgtttttttctttctcagttcttttggtttctatgattgtgtgctcttctgattctacttatttaattactccttgaccttttttccttcccctcctactcttaaataataatgaccttccccaaggttttatcttagaaattatcctgtttttttcttatgtctttcctagtctcatgatttccgcaattatctctaaaatgatctctctcaacttcctatctcagttgtggcattttctctaagcttcaggcccatattttcatctgtttacagatggctcagcttagtgcctcagacttcccattatctagcacatcattcatcatgagctctgcacccgctatttctccttctgttaatggacctctttgtcacccaggctcagagtctcagtgctgtttcggattcctcatcatttgcttcctacccttaggcacaagtgaagtcctgtcagttttacctctctaatgtatcacaaatgtttgaatcctctctttccgaatcccccttcaccatccaagtttaggtctttatgttacatctcactgaaaatattgcagggatctcccagcttgtgctgcttctcgctcctacttcattttacatgttgctgccagcttaaattatcttaagagataattttgcttgtattgtcggtgacactttgcctgtctgccagagtaaggacagattcctctaattttaaagatagtgtagctttgccttcatctgtccatttctttcaccctttaaacatttattaaacacctactgtatgccaggcactgtgttaggtcagaatgcaaaacattaaataaaaacaggttcctagctatactcaaaaaatagtctttctagggttggatgagcatgaaaacaattattgaagtgcaatctgagaagtgctatattataattgaaaagatatatttgattattccacactgtgtacatagatgataactataacatcactgatatgcccataattacatacagctataattttcaaaagaatttgaaaatacaggtgaccatgtcagaaaacaaaggtgtattggcatcacctggaaagactacaccaatgttatgagaggagagaattgtcaggcaggcttcacagaagagataatatttgagcagagtcttgatggatgaatagaagattgctgaatagaaattggaaagtgtaatactgtaaaatacatatgtgtttttgatgccatttcctggcattcaactcttaaaatccttgaaacctctgaagtgatgtctttttgtatgctaatgagttaactggtagatgacagccccctaggtagctttaggatgggggctggtcagcagaaagactaaggcaggattagagtcagaactttcagttcccgcccccaccaacccccaacatttagggaggggagaagggcgaaggttaagttgatcaccagtgacccgtggtttaattagttgtgcctacagaatgaacgttccataaaaatccaaaagaactgggttcagagagcttctggatagctgaacatgtgcaggctctggtgccctgtacatctctttatctgtcctttgtaacatcccctataataaacctgtaaacataaatgtttccttgaattctgtcagccgctctaagcaaactaatagaacctgaaaaaggggttgtgggtacctggatttatggctggttggtcagaagcacaggtaaaataacctgggcttgccattggcattggaagtgggggccgtcttgaggatggatccctcaacctgtgggatctgatgctgtctccaggtgggtagtgtcggaatttaattggaggttccagctggtgtctgatgcagaattgtctgcttgcttgttgatggggagaaaccctcacacatttggtaagaaaagtcttccctgttgattgttttggtgagagggcagaggaaaaatagtttgagtgttttccatactcacagaaggcaagggaattaatttcatgcagagcccagagcggggtggaggcagagcttgaaagtgtatagaatgtacagaagatagaataatttttgtatggcttgaatttagaataggagagagagtttgagggacaaggctggaaaggaccttatgaagaattttgaatgccatggcaaggagtctagactttattttgtgaaaaatgggcagtcattgaaaaattttaacatttaaagatattttggatcgtaattttttgttaaaattaatatgatggttgtgttagtcagttttcatgctgctgacaaagacatacccaagactgggcaatttgtaaaggaaagaggtttaatggactcatagttccatgtggctagagaggccttacaatcatggcagaaggtgaaaggcacatcttaggtggcagcaggcagagagaatgagagccaagtgaaaggggaaacctcttacaaaatcatcagatcttgtgagacgtattcactaccaagagaacagtataggggaaactgcccccatgattcaattatttcccactgggtccctcccacaacatgggggaattatgggagctacaattcaagaggagatttgggtggggacacagccaaaccatatcgttggtgatatgaatggtagtttggaaaaaggaaaaactaaaactagagagacaagttaggctattcttaactgtttcaagcaagaaataatgaagctgtcaacttaagatggaggtcaacttacccgtttaagcattggttgtttagaaaatgtttaattttcttctattcccctatgtactatactcttcagctggtgatttgaaatcgtccttccttttctctactctcttctcttggcatatttttggccctttctctcttgtggagtgcctgtgaactttaaaaaccccatctcaaatgccaattcatccctaaagttctttctaatctgtattgctttgactctaaatatatgtcttttcctagtctaaagcccccaaagcacttatttttattctacaggatattacttttttggtccctattaaactatgtggcagcaagtcacaaaggaggaatcagaaagtaacctgctccccacccttggtgtgtagtccagttagcaaggtatgtatataagtaatataagtaatgataaccaacattgccatgcaaaagtgaggaatgccacaggagtaaattgttgcttctagtcagagtcctgtaactgagaagcacaggtagaacataggaggttatgtgagctgagctttgaaagatgagtaaaatttagatgggtaaaggatatttctggaaaagtgcatggatagaaaatgaatgtttttgtaggaatgtggtgaaggtcttagaaagggcaggaagtatgatgtgaagaaagctcttttagtgaaattactctagcagtgacatataaactatacatcattagagaaatgaagtgaggaggtagggagccgagtgaggagattgtggcactagttaggcataagctgatcagaattcaatcagggtggtgattgtggaaatagaaaagaaagactcaatgataaaggtattgcggcagaagaagggacaccgatgtgtgactagatgttggaaagagatgatgccgcctgaattttgagcctggatggtggggataatgttggcctcattagtagccaaggtaagttggatcctacttttctaaatgtagagaaacattaaaatttatgttttactgtactgttggtctcttaatttgtttatgtgcaacaagtttttttggcattatttttccagccttaacatattcaaagggagattttatgaaaaaagcaaagtatgacctcttttacaaaagcagtttttaaggaaataaactgtattctgttcatagttacctcttttgctatcatgttaaatgctatgtaagatttagtaaaacttaagaatgtttaaagtatttctacaggtataattcagacaccattaccaaaggatggtatcttgttttaatagaattaccgcttaaggaatggggacctgtgaaaaattcattcagtagaattcgatggttccatattaacagataggcattattatggtactgtccattagagaaatattgtacagtaaggcagtaagttaattatataaaactggcttttaaaatgcatttattaaaattcttatcaactgttaactgatgactgatttagaactttgcaatatttagaaacagtctaatactctctgttgaaaataatcactaattgttttataattataattatacatgtgtaaaactggaagacattacattattgaggaaggaaggcatttgtgttttgtttgttttttaagtcaggctttgtgttgaactattattttttatttatttatttatttagatggagtttcactcttgttgcccaggctggagtgcaatggcacaatcttggctcactgcaacttctgtctcctgggttcaagtggttctcctgcctcagcctcccgagaggctgggattacaggcacccgccaccacgctcagctaattttgtatttttagtagagatgaggtttcgccatgttggccaggctggtcttgaacacctgacctcaggtgatctgcccacctcagcctcccaaagtgagccactgtgcccagtgcagcatactctgtttacaagcacaagcagtgtagccagaggacttcagtttgaatcttgactttaccacttagtttgtgttcccttgaaagaagagcctgagaaaaagacttactggctgataggttatttgggagatgaaccaaaaagcagaagtgagagaatgggaaaagtgagacagagaagggagtgaagtttcattaagtgggtgatccagttccccctgcgggcagctgggcttcagccctgtgggtgtcttctgaatgtacctcactgttgtcccaccaaaggacagggagcctgagacatgcatgcaccaactttcacctgttgttaattgaaggttgctccgtgagctttaactccggcaggtctgtgcttgtgcctccatgctgttgagcagtctcccttaggtttgcaaagtctccgaggaacaaaacagagcagtgcctccactcccacttgagtcaggtgctgtgcatgccacatagacctgcccaccagagccacagtgcggagaggggtgagctgcagagcaccacgaaggtctgctgtggtctgccccttttaccagtgagactccctcatgccccattagatctactctgtcactgaccctgcagattggtggctgattatgatcactaaaagaaatatctaacaggtgcagtggctcacgcctgtaatcccagcactttgggaggctgaggcgagtggatcatgaggtcaggagatcgagaccatcctggctaacatggtgaaaccccgtctctactaaaaatacaaaaaattagccgggtgtgatggcgggcgcctgtagtcccagctactcgggaggctgaggcaggagaatggcgtggactcgggaggtggagcttgcagtgagccaagatcgtgccactgcactccagcctgggtgacagagcgagactccgtctcaaaaaaaaaaaaattatatatatatagatatatgtatatatctctgaaacaagagggttaaaatccctaccactgcagctggtcctgagctcttatttccatccttgacattcatatgagaatgctctaagagccctcagttgtgctggcagtagggtgttctctgggtagggaaggcaagcccgcatctggagtgttggttctgcaccctccttgttagctggcatttggcagtggcagtagttaggtcacccttcataagaaggagcccatgctgttgggcctatgtagagccttcctctctgtcactccacaggctccattgacgggcctggtactccagccttgggaagaagctggctgacagcactgacaagccatcctgtctgtccttggggtgtagttgaatgcctcttctgtgggaggtgccttgtgttgggcattcacataagataaagattggcactttgtgttccctgccttagggccgtcagcgtgcctcttctccaggcttctggtctcttatttcctttttggacccttttaatacaaaaattagccgggcatggtggtacatgcctgtaatcctagctactcgggaggctgaggcaggagaatggcatgaaccctggaggtggaggttgcagtgagccaagattgcgccactgcacttcagcctgggcgacgaagcaagactctgtcccccgccgcccacacacacacaaaaaaaattaaccacacacccacttgcttctgtagagaaacctagaactcctggtctcagaaatgtcatccaggtctcgctttcaggctttttgattattctgcaactccagaaaaagaggctgtttagtcccactctcttccattcagactgtctcctcttaagttttaaagatactattattttttcttaatttaagcttagcggatttacttctggttttgatccctctccagtttgggtgctttaattttatttatttatttatttagaggtggagtctcgctctgctctctgctaatttttgtatttttagtagagatggggtttcacaatgttggccaggctggtcttgaattcctgacctcaagtgatctacccaccttgtcctcccaaagtgctgggattacagacgtgagcccctgcgcctggcccatttggggtacttttagatgcagacggtggtttgggaacttgcagctccatatggtatagtggggagagcatgccacaaggttttcaggtaatatgaggttttctcctcatattctcttactacacttcaattcctaactttatcttccagcctaataatttctctcttgcactactgtcttatggtttcaactgtgaaaggtaatttccagtctcggtgtcacagatactccagtttaacctctgattatatcttatgtattctttcttccttccttttgtttctcccttccctgctctgtcttttatagggcaggggttagggaacgtctcattgccccttttgtttttctttttcctcattgcctctttttaaaatgatcttttttttatttttaaaagattatatattggccaggcacggtggctcatgcctgtaatgccaacactctgggaggccaaggtgggaggattgcttgaggccaggagttcgagaccccatctctatttaaaaatacacacacacgtgtgtatgtgtgtgtataaagattatgtaagcagcctattaataagttcctatataaaattttaaacactatgcaccaaagccttttagtccctcttccccacccttcaccccattgccctcctcaccaccctccttgccctccatcccactgccatcttggggacctctgtttcttaggttattggtctgtttgtgtattccattccctgttgagttaatttttgtattaatatctttatagaaaatgatacttttttttttttttgagatagagtctccatctgtcgcccaagttggagtacagtggtgccatcttggctcactgcacccttcgccccccgggttcaagcaattctcctgcctcagcctcccaagtagctgggactacaggcgcctgccaccacacctggctaaagttttgtagttttagtagagatggggcttcatcatgttggtcaggctggtcttgaactcccgacctcaaggccgaactgccttggcctcccaaagtgctgggattacaggcgtgagccaccacgcctggtccatacagttattcttgattttcagatttattcttataaaattatgcctaatgagaatatccctctcataaagttagtgtgaagattaaggaatttaacatatgaagtatgtagaacagtgcctggcctatagagctctaagtgttaactattatttaatattattatgcttgaatatttataattatttttggtaggcctccttgtacttcgtattatttatttgttctttatttttgtgcttagacttcctagggatattgaactttctagataatttcatgggtcttttcaaagagccagcattttggttttataaattaactccacttttttgttatatatttaataatttttgcttttaacatactaccttttcttcctgcctttggtacccattcttccatctcggttacacataatattcttctatttttaaacatttttctgttgtttctgaggatttaggagcagtaggaacacatttgtttattctcccagccttagttagagctgcttgtatattttcaaaagcttcttgcacctctgtctcctgatggtctgtaatttttccagcaacccaggatttaaatctgggaaccacctatgacaactgcatctctgctttctatcagatctagaagttgctaaattttatcagccccccctctataatagttttcttccacttccctattctcattgcctcttggttgggatggttacttcttgtgtgaactactgtaattaccctttggcttatctacctcaccctgtccctttcatcccatgtaatgcttcaagagtgatttttctaaaccatggtgcactcacttctttgctctgaaacctccagtgatttctccttgtctgctgagtaaagttcaggctactttacactagcatttgagaatcttatgaattaattcctgcctacacttaatcattctttattcctttgttctttaggaaaaatcgtaattggtaagataaaccaaatataaaactatatagtaatgctgtttttcagtcttactgatctcactctattccttatctttaccatgcttttctgactttgtgcttttgcctctggatttcccagtctggaatgcctctctcacatcctagtatgttgaaatctgtccattattcaagtgtgagcttagatgccaacactttgatgaaggcttatctgatcccattgcctagaattaatcttctcttcccatgtctttggatttgaactgcagcttctgtgctctgttactagtcattccattttcgatagtctaccagtaacttctgtgccttagatccacatttacactggcttgtcaggattggtcagtgaatcaaataggtagtaagtataagcttctagaactacactctccgatatggttgtcattagccacttgtattttgactactgagtagccacatatggttagtggctactttattgagtaacatagagactttcatgattgcagaaagttattttgagcagtatctagaacaatgcctggcaaataatagacaccagggaatgttgttcctaggtatcacatcctcatagtagacactcagtaaatattagtttaactttcctttcctcatctgaattttattagcgtttacctgtgccatttaaaaagtaacagtttatggcagctaacacagtgtatgaacaataaatatattttgggtgagtaagtaaatactacgaagcatccagaaagcatcttgctctcttttggggtggggagagtaggggagtggaagttaaaaaaaattcactactcaggccgggtgcagtggctcatgcctgtaatcccagcactttggaaggccgaggtgggtggatcacttgaggtcaggagtttgagaccagcctggccaatatggtgaaaccccatctctactaaaaatacaaaaattagccaggcatggtggtgcatgccagtaattccagctccttgggaggctgaggcaggagaatggcttgaacctgggaagcggaggttgcagtgagctgagatagcgccaccgcactccagcctgggtgacagagcggactccatttcaaaaaaaaaaaaacagttcattgctcaataagtgaatatttccaggatgcttaaattaaacagggtagactaagcagctaaataaaggtggtcttatctactgcttttcaaatttagtgtacgcgcatgtcacctgggggtcttgttagaagattctaattcagcacggtctgggattctgcatttctagccagcttgcaagctagccagctctgcccagtgagggtgtaattcactagattggctacttaaacccattttaacatttcctagtctttagaactagtcctttaatttagctcaaagttttgttgttgttgttgttgttttgagacagggtcttgctctgttgcccaggctggagtgcagtggcatgatcatgactcaccacagccttgaactcctgggctcaagtgatcctcctgcctcagcctcctaaagtgctgagatggattacaggcatgagccaccacacctggcctaaagttctcctttttgaggtgataatttttaaagacagcccttatatgttcaggaaatataagcctgtttttacataaagtaggtgcattgttcagtaccaatatgagaaagaattatgaatacagctttatattattagatttcttatgtcataatataaaaaaccggtaaacttagcgctgaactattcatgatagttgaaagttttaagctaattcaaaatatgaaataaaccagaaatattttggaaagaagaggttttaagtatattcaggtcctccattttatgatgtgagtctaaatttctgttctctgatgtctagaaatcacaaaaggatggtgattttgggaacgaagttcttgagctagcactgtcagtagtaactggccgttactgtaagatctagagatatatttttagatgccattatacttacaaagaactgttagagtgcattttatggttttatggttggtttaattccccaaatatattgcccttagcaagttattactattttttatttcttaaatttatttattgaacatttttattcctttgtttagaaatgtgctagacagtggcaattacattgctgcaagataagtaaaaaaatcagctgactaagctttataagaggaggaatcatgtctcttttatttaccgttggatagtcactacatggcacataaccaagtcatcattaagtcatttttgagtgaacattgctcaagatctgcaaagcagctgtgatgtgtgcggggtgtactggaagttgaacgggactcctcaagcagcctaatgagttgggattgaggattgcatacacaagggaactcgcagatcaagtcctgaagagaacattgtagttactctggcaaagaacaacgaagacacaaaagctgtgcagagtaatggaagcctggaaggagtgcctgtgaagggagagcggctgcactgactttggtagagttggagcatcgtaagggtatggaggagaggggaggagagtagtagaggtctcagcagttgtcagatgacaaaaagtcttgcgttactaattttatcgtatgaaatgaggatattttttaggtttttaagcagagagaatggcaaggtcatttggttttagaagttagtccgagctaggcatggtgacagatgcctgtactggacaagctgaggcaggaggatggcttgagcccaggagctggaagctgcagtgagcagtgatcacatcactgcagtccagcctgggcaacagagcaagaccttgcctttaaaaaagaaaagtctgaaatacccctcacaactgttaaaaaaaaaaaaaagttctttcaagcacacgtggagtgttttatgaaagtgaccatttactaggctatacagcaagttcttatacatttcaaataaaatcaaccatgttttctggcgagaaagcatgtaggaagtgaataacaaactgtacacattgggaaatttaaaaacacacttctgtaaatcccacagattaaatataaaataatcaatttagtgaacacctagaacaaaacaatagagaaaataacagcctgagcaaaatagtgagaccctgcgtctacaaaaaaaaataaaaattagcccggcacagtggtgtccccctgtagcccctactcagaaagctgagatgggaggattacttgagcctgcaaagttgagtctgcagtgagccatgataacaccattacactctagcctggactacagagcgcaagaccttatttcaaagaaaaagaaacttaggacatattaaaacgtgtgtgaaaccctgaagccttaaatattcatatttgaaaagaagattttaatactaataagctaatctaagttagggaaagagcatggcagtaaattcaagtgaagtaaaatagagaatacagataaaagctaacaattctagagttcttactctattccaagcaccgttccatgttctttacaaaggttatctcatttaatcttcacaaagccatatgaggagggtattgttattatgtgcactttacacaagaggaaacttaggcacagagagaaacttatccaagcctctagctaataaatgtgatagaattggggcttgaaatgatgaattttttaaaaaaagatacattgaagaggattaacagagctgaaagttgttttttatgaaaggctaataaactatttgaaagattgatcaagaaaaaatataaagtacaaataatactgaggatataaaaggaagatacagaagaaagtcttaaaaataaaatatcttgaatcactttataccaataaattttacaatttaaacgtcaattttctagaaaattataacaatgaaaattgacacagagtaaatagaaaacctggatatttctgtaactgttagagaaattggatttgtaattaaaagaaccacccactttcatatattcagagataagcctttggcccagatgatctttttttctaagaaaaaaaaaaacaggcctcttcagagacttcatttattatatgaagaattagtgaaaactttgtcccaccattttaggctatttttacattagaaaaaatactgcacatttatgaaaatttactaggggcaaatttcaacttatctgtaaaatagtaatgccaactgtggagatggcactgtaaaccaaaaggcacaatgactaaagaaactactgaaaatttaacaattatctcttcattatccttccttattggggaacctgccccgatagtcatgtaggttcttttctattttccgtaagtgttggctggttagagaaataaagggacagagtacaaaagagagaaattttaaagctgggcgtccgggggagacatcacatgtcggtagattccgtgatgccccacaagccgtgaaaccagcaattttttattagtgattttcaaaaggggagggagtgtgcaaataggtgtgggtcacagagatcacgtgcttcacaaggtaatagaatatcacaaggcaaatggaggcagggcgagatcacaggaccacaggacggggcgaaattaaaattgctaatgaagtttcgggcaccattgtcattgataacatcttatcaggagacagggtttgagagcaaccagtctgaccaaaatttattaggcgggaatttccttgtcctaataagcctgggagcgctatgggagactagggcttatttcatccctacagtctcgaccatagaagacggccacacccaaggggaccatttcagaggcccaccctcaggggcacattctctttcccagggatgttccttgctgagaaaaagaattcagcaatatttctcctatttgcttttgaaagaagagcaatatggctctgttccgcccggctcaccggcggtcagagtttaaggttctctctcttattccctgaacattgctgttaccctgttcttttttcaaggtgcccagatttcatattgttcaaacacacgtgctctacaatttgtgcagttaacgcaattattacagggtcctgaggtgacatacatcctcctcagctgacaggattaagagattaaagtaaagacaagcataggaaatcacaagggtattgattgaggaagtgataagtgtccatgaaatcttcacaatttgtgtttagagactgcagtaaagacaggcataagaaattacaaaagtattaatttggggaactaataaatgtccatgaaatcttcacaatccatgttcttctgccatggctttagccagtccctccgtttggggtccctgacttcccgcaacacttcctgctccaagatttgctatgatgagttttccaaatgttaacgacctggaaaagctcattgtctttaagacgtatcccttctgagtcttgtgatttggtggtttcttcatccaaaacgtatcatcctctataaaactccctgatcctcagatttaacttttcagtttctttttccaagttctcatcagtggtttaatggctgtatctgagcacctaaaaggtaaagactcttccaagctgttgagactccctccaggcaggggaatgactatctgggtctgagattatgtcattaagttctttttttttctttttctttttttttttttttctttttgagacagagtctccctctgttgcccaggctgggatgcagtggtgcaacctccactccctgcaacctcagctgcttgggttcaagcagttctcctcagcctcccaagtagctgggattacaggcacctgcctccacgcccagctaattattgtatttttagtagagacagggtttcacatcaggtctcgaactcctgacatcaggtgatcaacctgctgggattacaggcgtgagccaccacaccctgcgtcgctaagttttttaaccagagaggcttcaggtttcagacacacagaagcataattctggccatacaaaaacctcagtttcttctgtcttccacccaatcaaagtctccttcaaaactttaagtaagtttctatttgccacttcaggacacacctgcactgaactagacactgacttagaaacttggtttgatttggcaaattttctgttaaaatgctccatacttttcttatgcctattagagttatttctgacctactgtatttactttcagaattttctgaagctataatctttcaggaaatagtactattttttgaaatagtatttctattttttgaaaatagtatttctattttttgaaatagtacttttcaaaaaagtactatttgaagaactcttgagtatttactttctgtaaaggaagttcacatgtggcagctttctcctgagtatctaatttgcaattgcctaactgctcagtgacatccactactgtctgttctttgtgtttggcattagctttgagaccagctttctttttcattatgcttttttggtgcagctgtcgtctaatacttgttgaatttggtctgtttcctggtagaatggaggaaacaaagtcttgctcattatcactgctgctgtcattatgagtgctggaagaacaattgctagaagattcatattgcttttcaaactggctaggattgttgatatctgatgttttaatggctttactgcataactatttcttttccagaatggccactttgcccttcctttagcagttgaaaatctggatgcctctcaccgtactggagttttgggaatttgtgcttcaaaaaactcagatgcttcataacaaaaattgctgcaaaaagactttctttcagtaatatcatagactttattggttttgaaattttatatttaattcccagcttcttgtgacataaaggataaccacagagtttgacaatagaatgttcattcactacatcgttgtagtgagcaggtgtaatgaacttccccttttagaagcatcttcttgtttcaaagtacttgtctgtttagtacctgtggcatttcgagaatggtgggagccctggccctctgcagcccagggcagtcagccatgggagagagtagtctgcgggtctggaccagctccagagtctcgccccgaggcaccatctccctacctggcccacgttatcttaagggtgaattcttttaaactgtccatgtcgtaggtatgtccagatttacacatgccattccagagaatagcaaattaaggaaagttcctcagtttattgtgactagtataactttggtaccaaaaccaagcatggctaatatgaaataaattatagaccagtcttgcttgtgtaaaatctaacaagataggagcaaaagaagtccagtattatgtttaaatattttatatgtatatatctcatgtctacaatgctgactgtaatacagttctgacagagttagcatgaaactccacaggtttaagggtgcagttcccaacgagactgcccttgctgcgagtacaagttaaaagtttggtggtccccagaccacctgttattccgattaactggctgcaaatctgggggttcccatgaatcccctcaagtttgataatttataaattaactgactgaacttgggaaagtggtatacttaagttacactttaattatgaagaatacagatcaggaccagccaaatgagatacagggtactgggagggttcctaacatggagcttctgtgctctcttctcctgggatcagggtatgtcaccctcttgacacatcagtatgctcaccaatgaggaagcctacctgagctatggtgtgtgtagattttatatgtaggtgtaatggaataattggccatgtgattgaactcaaactttcagtgttctctcctttcttccttagaggcttggctagctcaaaccccatccttctacacatggtggcctttctggtgagcagaccccattctgagtcatcttgttagcataatctcccccattctgagtcaattgttagcataatctcaggaatgatccatgaggctcgtgagtaacaaaggcattcctactaccaaggaaattccatgaattagaggttctctcccaagaactagggtcaaagactgaatacattatttattatacaataatgacaaattgaaattatcccaggaatgcaagataagtgtgttaattatcattgctgcataacagtttatcccaaaacttaatgacatgaaaccctaatttacaagaattcaggagtagcctagctggatgtggttctaatctttatgtttcacaaggttgcagtcaggaagtcagcaggggctacagtcatctgaaagcctgactcggggagaatacacttccatgtggcatactcacatggtggttggcaggaggcctcagttcttcaccctatgggccttcccataggctcgagtatcctcacactgtgacagctggctttctccagatctagtgatccaaaaaaaaaaaaaaaacaaggagaaagctgcagtgccttttaagacctagtcattactttattcgtttctttttttttttaaattaaattgagatggggtcttgctatgttgaccaggctggtctcaaactcctggtctcaagcagtcctcctgcctgttcctcccaaagtgctgttattacaggcagaagcctgtagtttttcctgtatcctgtttgttagaagaagtcactcagtttaacctatactcaaaggaattagtttccacctcttaaaaagaagagtatgaaagagtttgtggacatatttaaaaaccaccacagatggtttattcagtaaagttcttaatatgaattagtattaatttattaattcatttgcacattttgaaggagaaaaactctgtgctcatatcactagatgaagcaaaagcacttgatgaaatttaactccatgatgaaacctctcagcaaactaggaagggaacttccttaatgtgataaagactttcattaaatttataattaatttaggaacagttgacataccttatattgaagctttctgtacgtaatatgattcatctatttgttaaacttattattttgttcttcagtattttaaaattgtgtttatatcagtgttttacatttggaattgcaaaatgatatagtgaaagatgaagactggaagtcctagctagagcaattaggcaagagaaggaaataaagggcatctaaattggaaaggaggaagtcgaattgccacgatcatatatatatgtggaaaaccctaaaaacttcaccataaaacttttagaactgataaatgaatttagtaaggttgcagagtacaaaatcaatatacaaaaattagtagtgtttctatacaccaataatgaactagcagaaaaagaagagagtaatccatttacaaaagctaccaaaaaatgaaatacatttgaccaaggaggtgaaagatctctacaaggaaaactataaaacactgatgaaggaaattgaagcgggcacaaaatatggaaagacatccatattcaaggatttgaagaattaatactgtgaaaatgaccatactaccaaaagcaagctatagattcaatgcaatccctatcaaaataccagtgacagtcttcatagaaatagaaaaaaaatcctaaaattaatataggaccataaaggactgcaaatgccaaagcggttctgagccaaaaggacaaagctagaggcatcacactaccagacttcaagatatactgcaaagctgtagtaactgaaacagcatggtactagcataaaaccagacagtagaccaattgaacagaatagagaacctagaaataaatccacatatttatagccagctggcaaaggcgccaagaacatgctttggggaaaagacagtcttcaataaatggtgctgggaaaactggatatacatatgcagagtgaaactgtacccctgtctttcaccatatacaaaaataaactcaaaatggattaaagacttaaatgtaagacaaaggcaccaaagacaaagtgaatcatctattttcttttattattattattttttgaagtatagagatggggtctcactacattgcccaggctggtctcaaactcctgggctcaagtgatcctcctgccttggcctctcaaagtgctggggttataggtgtgagccattagcgcccagctaaatactgtattttcagcccatgtttgcctgcaatatgaagagattgctatacttattgaaaagaagagaccggaagtggtggttcatgcctgtaatcccagcactttggaaggctgaggcaggtggatcacctgaggtcaggagttcgagaccagcctggccaacgccatctctactaaaaatataaaaattaaccaggcttgctggcatgcgcctgtagtcccagctactcgggaggctgaggcaggagaatctcttgaacctgggaggcggaggttgcagtgagccaagattgcgccactgcactccagcctgggcgacagagtgagactcgtctcaaaaaacaaaaagaacttgcatataaattgacccatgcagttccaacctgtattgttcaaaaaaaccaaaacctcccttagacctagaatcccacttctgcaaatccagcctacagttttatcagcccaaacaacaacaaaagcatctcttcaagtttatttattgccgcattgcttatactaaattattggaaatgatctaaaatgtccatcaacatggttgtgcactgtggcatgcacctgtagttgggactgctcgggaggccgaagcagtgcaatctgattgcacctgtgaatagctcctgcactccagcctggaccagcatggcaagaccctatctctaagaagaaaatgttcatcaacgagaatgagcaaatatgaccataagatatttataggataaaacactagataacaatgaaaatgaattaagaagaactacaagtatctatcatggaaatacttcacagtgttatgtgaacaaaattaaagcattatatatataaaaacagtaaagtttttatatatctgtagaaagtttaacaatatgtaaggcaatgctatatgttacttaacaatcctttctttgaaataaaaggcaagttgatgtgtgtttaaactagaaatcccaggaaaaaatcagaaaggtacctgggcttaaagaaaaatgctaaacggggctgggcgccatgactcacacctgtaattccagcagtttgggaggccgaagctggtggatcacccgagatcaagagttcgagaccatcctagccaacatggcaaaaccctgtctctactaaaaatacaaaaattggccaagtgtggtggcatgtgcctgtagtcccagctactcgggaggctgaggcaggagaattgcttgaacctgggaggcggaggttgcagtgacccgagattgtgccattgcactacagcctgggcaacagaatgagactccatatcaaaaaaaaaaaaaaagatgctaaaaggaaagcagggacaagtaaatgtcaaatccatttcatgccatagaacttttttttttttttttttgaggcggagtctcgctctgccgcccaggctggagtgcagtggcatgatctcggctcactgcaagctccacctcccgggttcatgccattctcctgcctcagcctccccagtagctgggactacaggcgcccgccaccacgcccggctaatgttttgtatttttagtagagacagggtttcaccatgttagccaggatggtctcaatctcctgaccttgtgatccgccatccttggcctcccaaagtgctgggattacaggcgtgagccaccgcgcctggcctagaacttcttacaacaccctaaaccagtacatttcaacctgaaaagatgttgtaacgcagaataaagaaaataaagtacagatatttcattcccaaggcggggaactcttctaggttcccaagttcttgagcttcacgtgcatacagcaggaatctgtcatcttgagggagttctttcttaaacctatgggtttgtaagattttagttttctatgctgtccttttttggtcatgcttgtcagggaagaattgttaaaaatctattttaacaccctctgcccttattcagggcagttagagacttaaattttacgtacacatactacctttgaaccttcagtgtgttgtttatgtactgaaagattgcagttgaatttagatcatgctttgaagttccctttgtcagaccacattgtttgtacccaaagaaagacttcattttctttttgtctgtaattatttccatacttatttaacttggtataacatgtggtactgtaaaagcataacccaagccattgtttgccttaagcaacattttagacattttagatttggggatgtggtgtttacttatacaagcctttcttaagcccttttaatttatatctcaaacttgaggatatccatgaaaacagcggaaactttttcctcaccggatcttgacacaagtcagggatggaagtgagcaaaaggaagtggtgtggtttttatatcatttcagttgtgttgagatagggaaatgggatagtttatccactgtactgctcttttgggaaagtctggtttgtatataaaagtgaaaggaattggcataatgttttaatttcttctgctccattcagtcattccctcaataaatatttatttagtatcgactctgtgccaggcactgttccaggtgctaaaaatataaagtgagtgaaacagactaaccctcctggcctcatggagcatatattctagagcaggtggcaggcaataaaatacagaaaaattatatcaaattatatagcatgacaaatgctaaagagaaagaaacagccagaaaggagaggagtgctaggcatggggatgggattacagttttaaatagggtgggcaggaagcctgtaaataagaaagggattttgagtaagtgcttggaaggggcaaggcagcagtcccggggaagaccattacaggcatagggatctgcacgtgccagggtcctgcagcaggactgtgagcggcaggtgcaaggaacacctattaggctggaacggagggagggtggaccactggagactttagctttttgtctgagtgagttggagcaccgttggagggatctgaatggggtgtgatgtggtttaacatgctttctcttaggatcactctggctgctgtgttgcaaatccatagtgggcacaggtggaagcaggaggccagttaggaggtgccttcagcaatccaggcaaaggggttagtggcttggtccagagcgagcagtggaggtagtaggaagtgtgtgggttctggacagattctgcaggtacaaccagtggatttgatgacaggaaatggaatgcaagaaggaaagagggagttgtcaagaatgacttgagattttaggcctggttacatcagtgtagcgatattctaaaaataaaaaaaaaaagattttagacctgggacttttaagattttacaccaagtaaagaggctgtcaacggaggtgggaaagacttaggatctagcaaatttgggagggaagaggcaaggaaagataaatagtgacaaattgtatagttgctgataacattgttaagtcaatatttatactatttgagctgcctttttttttttttccccctctgagacagtctcgctttgtcgcccaggctggaatgcagtggcacagtctcagctcactgcaacctctacctcccaggttcaagcagttctcctacctcggcctcaagtagctgggattacaggcacccaccaccaggcctggctaatttctgtatttttagtagagatggggtttcactatgttagccaggctggtcttgaactccccgcctcaagtgatctgcctgcctcagcctcccaaagtgctgggattacagacgagagccactgtgcgggccttagctgtcttaaaaatagcacttatagcagcctgtgttttcttttcagatgttatcaagtatcttttctggtaagacatttatttgcctttattcagaattgctaattttatgctaatctaacccagaatactcaagtgtgcctttccctttaatcctcatattagctatattagctagaatatttttggttgtaacagaaaaattgactctctctgacctaaaaaatggaatttattggctcttaagagttccaaagtaattgaggcttcagacaaggttgcttgagtggctcatcgatgtctcccgggatctggcttctttcagtctcctggctctgccttctggttctccttctgggcccaacatagctgccagcagtttctgggactgccttattcatattgagtctgagagagtgactttgtcactgcagggtcagtcaaagtcctgagactattagaccagctcgcccctgaactttttgtggcagggaagatagaatatgcttagtgtaagagcctctactcctgagatcttaggggaaatctttgtaccctgaattaaaaaaaatttttaaatagttacataagtggaaatgattgatttttaaaaattgcttttgcattgtacaagcaccatggttaacaaaacaattcctttttaaagcagtcaggtgggaagggaaaaaaagtaaaattgtattcatacattagtttgatcaagataatttttcttcttagagatttaatagtgttgccacttgaccagctggaactacaaaggaaccattagatagtaatgaagtatgatacccttttcagcactccttctcacctttttactttacatctccagttttgcctcgcacaaggtctcttcttcctctgtggatcctctacctacatgtgtctacctgctaattagacaggcacatgcacactagttttctttatccccaaaattcagtttgcaaatgggaccgaagagctccctgttcccctcatgacaccgacacgacaaaaaaaagttattccactaattcccttgatggtcggtttaggagtttctgcctccactattgctctcggtactggaataacaggcatttcaacctctgtcacgaccttccgtagcctgtctaatgacttctctgctagcatcacagacatatcacaaactttatcagtcctccaggccctagttgactcttcagctgcagttgtcctccaaggacaactccgaggccttgacttactcactgctgaaaaaggaggactctgtatattcttaaatgaagagtgttgtttttacctaaatcaatctggcctagtgtatgacaacataaaaaaactcaaggatagagcccaaaaacttgccaaccaagcaagtaattatgctgaatccccttgggcactctctaattggatgtcctgggtctcccaattctgtcctttaatacccatttttctacttcttttattgggaccttgtagtttctcaattcatccaaaaccgtatccaggccatcaccagtcattctatacgacaaatgtttcttctaacaatcccacaatatcaccccttaccacaagatctcccttcagcttaatctctcccactctaggttcccacgccgcccctaatcccgcttgaagcagccctgagaaacaccgcccattctctctccataccaccccccaaaaattttcgccgccccaacacttcaacactattttgttttatttttcctattaatataagaaggcgggaatgtcaggcctctgagcccaagccgagccatcgtatcccctgtgacttgcacatatacgcccagatggcctgaagtaactgaagaatcacaaaagaatgaatatgccctgccccaccttaactgatgacattccaccacaaaagaagtgtaaatggccggtccatgccttaactgatgacattccaccacaaaagaagtgaaaatggccagtccttgccttaactgatgatattccaccacaaaagaagtgaaaatggccagtccttgccttaagtgatgacattaccttgtgaaagtccttttcctggctcatcctggctcaaaaagctcccccactgagcaccttgcgacccccactctgcccgccagagaacaactcctctttgactgtaattttcctttatctacccaaatcctataaaacggccccaccctcatctcccttcgctgactctcttttaggactcagcccgcctgcacccaggtgattaaaagcttttattgctcacacaaagcctgtttagtggtctcttcacacagacgcacatgaaactaggcaagaatcagtgtttctctacaaattgagttgacaaaaagaaattatcttcccctgcccccacaaaaaaagaaccagtatttctcaacaaggagagtactgttagcatttggttctttattttgaaggattgtccctgcacattgcattttctatcctggtccctggtcaaactgtatgtcctgtcatatcccagacattattccaaccaaaaagtcacctacatatttttagatcctcttaggagggggtggtaacccagccactgctgatgcctgaggggagtgcaaagctgggtttttgaggagctgggactgagatcctgagtagtaggcaccactgggcctaaaaggattccatggggttggttctgggagtgtggaaggaagcagagagtgtagattgctgctgccaattgaatgccagtggcattcaggcaactgacaggaacagcgaaccaaattgggaaaaagaaagtcccttctcccctcttccagctttctctagttccccagttggcagagcctctccaggaaccagctggtgaaggacatattgtcagcagcatcccagctccagcatcagaaagcagaatctatagatagaagagggagctttttttttttttttttggctgaaaagcgatagtgtaaaaagggacacagtactttctgttttttaatctcattactttcctgccagcgccttaacatgcagtaacaagtggaatttgggctttgtcagcagcaaacctgccacttactggttgtgttaagttgggcaagtttctttctttttttttttttttttttttttttttgagatggagtctcgcactgtcacctgagctggagtgcagtggtgtgatcttggctcactgcaatttctacctcctgggttcaagtgattcttctgcctcagcctcctgagtagctgggtttgcaggtgcctgccaccacgcctggctaattttttgtatttttagtagagacagggttttactatgttggccaggctggtctcgaacgcctgacctcgtgagccaccatgcccggccaactcaggcaagtttctttgcgcttcatttttttttttttcagagttatgaagatgaaaaaagatcttacagggttcagtaaaaaataacttccagtttcctgtttaacatatgtgctcatggtatacccgacaaaacactgcactttggattagaaaacctgggtgttagtttgtcatatatactagctacatggaattcagcaagttatttatctccttgaacctatcttttctctgtaagtaggaatgattttacttactgtaaggatcacagagatgggataatgcacgtaaaactaatttgtaagttataaaaatgacagtgacaatgggatgctaagcaggtaccattaaataccaccacatatctgagtttctctgatttaatctgcacaaaatacctagatcatctgttttaggctagactctgaactctttaccaccacattaaactgtttttttctctattcaatttaccagtaaaggttgagcatccctaatccaaaaatctgaaatctgaaatgctgtaaaacctgaagtttttgagtgttgacatgacgctcaaaggaaatgctcattaggtgttttggatttgagttgctgaaccagtaagtatagatagtgcaaatattacaaatttaaaaatccaaaatccaaaacacttctggtcccaagcatttctaataaggagtagtcaacttgtacccattgtatgcctatggggtgaccagaccctctccctttccagacagttctgcaataactgattcacttcgcctgtttttggtcatttctgcgtgttctagaggagaaacagaagagtgacacctaggtctcttaaatagacagctgacagacattacgaatctcttcgaagtacagatatgccaaagattgctgtgtagtacaatctagttgtaattgtgagacttttgttgttgttgttgaatacagttaaacaaaaaagctttggagaaactaggttagggaatttgtagtacaaggttgaatgatgttttgaaaacagattatctatttgaaaaatgtttcagaaacctggaagcatttcttctgcatctaatgttgaggtcctggtgaagggtataaaacacacagcatcaactatatataatgctatactagattgtcttgattctgtggtcctggaagagtttatacttgtgttggggaaactatcttggcatagaaggaaagtgaaggttttgagtggggcagggacagttgagcagaaatacaaaggttaaatgtgggcttgttttgattgttaattaataattgagcatgggggaaaggtagagttggaaagtaatttcaggggtggcgatgaaattggtaacttcaaagtggtggagacatgacagtggaagttttatacagtggaacttccccatccctgttttaggtcttcacttagttgcatggttggctctctttgctcctggcccacgggcattattgtaaaactttctaaaacaccctgttatgaatgtcttacccatagcaagatctgacagcgtggacaccaaggcaggcatttcggtaagatttctgtgtattacctcagatacactcagacaactctttaagcaagttattttcttcagggtttatgtttagatttgcgggatattgttttctacactgatgtaaataactgcgagtggtgttgctccagttgtacaagtgtgtattcctctaaggattgatggggaggagtgtagagaacgggaaggaatggatgagttgcttgttaagggaaaagatgatattcttatgctaatccaggccctggataaggagcagagcagccatgcgaacaatggccttggagccaggaagtctgcagtgagtctattccttctcagaaagcttgtcagacccggcgcctggagctgcctggcggggagggacccctggaaaggagagttttctccttgctattttatggaattggctgctggccagcttgttggaaattcccaaacttctctactagaaagtgaaaatcaacggtggggggcttaacaggaagaggaaggaatgactttactctgtagtctgttttttcaactgacttcagccttttcctgtgtttttttttttttaagttccaattgaactgttggttcagttgtcttgctgtttgaggagttttaaaatcttttacttaaaaaagaaattatttatatttgagtaattctgccttaatgttattttcctgaaaagaaacagtaccagtctgtgtatatagcaaggggaagtaaatttatttagatgcccatttcgtctaactattcaatagcttttaaatggcagcatgattaaaaaattttgattatgcagcatgtcaaatatctgcatctccttatattcttcactttgcaagattagatatttttaatgtaaaaattccgatgaatcatttaggaatttaaaaaatatattttatcgttagatattacaattacataattttaagaatgattgtggccaggcacggtggctcacacctgtaatcccagcactttgagaggccgaggtggacagatcgcctgaggtccaggagttcaagaccagcctggccaacatggtgaaaccctgtctatactgaaaatagaaaaattagctggacgtggtggtgcgtacctgtagtcccagctactccgaggctgaagcaggagaattgcttgaacccaggaggtgaaggttgcagtgagcagaggttgcaccactgcagtccagcctgggctacagagcaagactctgtctcaaaaaaaaaaaaaaaaaaggctggacgttgtggctcacacctgtaatctcagcactttgggaggcagaggcgggaggatcacctgaggttgggagttcgagaccagcctgaccaacatggagaaactccatctctactaataatacaaaaattagctgggcgtgatggcgcatgcctgtaatctcagctactcgggatgctgaggcgggagaatcgcttgaaccctggaggcagaggttgcggtgagctgagatggcgccattgcactgcagcctgggcaacaagagtgaaactctgtctcaaaaaaaaaaaaagaattgttgaaaaataaggttaatattttgctatgtgattgtagaaacagttaatatgagacaaaggagaagtgctcagttattaataattacatctgtttgttgaaatgtttactgagatgtaatattactaactcttttgagttagtaatatccccattttgtggtgaaggaaaccgagacctggatagcttaagtaattccccaaaatcacacagcaaataaatactggagctgatttttaaaaattatttatatttattattttatcagtgaataccacatcagtgtatgtggtgttaacgcctttattaatgcagtttttagacgaatggtgttctggggccctcccctcttttcactctcttggaaggccatctccagagtcatagctgaatattaccgttcttttagcataaccgatttgtatgttcagccccaaatgtgtcctttaagtttcagaaccaaatgcccgttagacattccctttgggtaatctcagatctctaaatttgaacctttgatctcttcactcctgtcaaaatcactcattcccatttcaataactgttcatgccacagatgtgggaatcttctttgacgcctcactttcccttaccctacatttaatccattgctaagtaccactgagttttgttttgttttgttttgagacaaggtctcgctctgttgcccaggctggagtgcagtggcataatcaaagttcactgcagccttgaactcctgggctgaagagatcctcccacctcagcctccctagtgtctgggactacaggtatgcaccaccatgcccagctaatttttttaagttttttgtacagatgaggtcttgcagtgtttcccaggctggtgttaactccagacctcaagtgattctcccacctcagccttccaaagtgctgagattacaggtgtgagccacgtacccagccaaaaattatttttgaagtatagcatgagtccatccactataccactgccaccctattctttttttttttaattcatccatctgcacacggattctgccctaatcttaaccaccattgtcattctcctaaatttccacaatattctgcttactcatctgtttgcttttgctattatcccctccagtccattacgtagaagtcagatgatgcccacttaggcttaaatcccaagtccttcatatgcccttgcctgatctggtctttgtcttctctgcctcttcaccctcatctcccactacactatctcttattctcaacatttcagacattgttctctctttgcttttctctccctcaagatctttgcccacggtgttccctgtgcttagaacttcccgtctttctttgcctgactgactctatttttcagatctcaacttaaaggtcacttctcagcattgcttccctttccgcttcatctagattagaggggggtcactgcccctattccttcaggacctggcacttttcttcctttgcacttatcatgagttatgattgtgtatcatttgtgttttcttgtttggtgtcttgagtatcttaattgttttgtttaaggactctgaacttcatgaaggctgggcctgtttggctctgaacagtgtattcttggtatctaatacagaatcatgcatagcacagacacttaataaacatttagggaataaattaataattcaacggcaagaacactgtttccataggactccagcattggaagggataacgtagattatttagtctagggccaggcggtggtggctcacgcctgtaatcccaacactttgggaggtttaggcgggtggattgcttgagtccaggagttcgagatcagtctgggcaacatggcaaaccccatctcaacagaaaatacaaaattagccaggcttggtgacacgtgcttgtggtcccagctactcaggaggctgaggtgggaggattgcctggagcccaggaggcagtgagctgaggttgtaccactgcacttcagcctgggcaacagagtgagactctgcctccaaaaaaaaaaaaaaaatttagtccagtctccctttctatcatgttggtcatgtctttgacaaagatgctctcaaactttattccttatgtactctgtgagcaaagtccctgggttcttttggttgtatctcaagtggagtggttgctatgtcctttgcattcctgtcattcttctctcaagtgcttaggaggcctggccaggtggaatacagtaagatggttgtcctgtttgattacagcagcatttcccttcattctcagactgcatgcatgtcttaggagttgtcatcaataccaatacgtattgagctcgtagtcagggaagatttgatggctgttctccatacaagttatcacagctttttttgtctataaaaatttcttgcagattgaattgttatggatagcacctgttagtgacttcctttgccaggttggcaagtgtgttgtaaacatggatgagaggaggaaacttctatttagcacctactatgtaccaggctctcctaaatagtttaaaatgtgtatttacattatataatatatataaaatcaggcagggaagtataggatagttgttaacatgtagaatctggaatcagacctccttgattttaattatgactctgccacttaacctgttgtgtgatctttgataagttccttaaagtctacttgcctgtttcttcatctgtaaaattaaaataataatttaacctttaaataagttggttgatggtttgataacttaatatatgcaaagcatttatgactactggcacatagaggttaatatgtgttagctattattttatatgagttccttaagtttaaaaatatttaaatttatttaattttttattttaaaaattattttaaatatgtgtttgctgttatctcatttggttctcaaaataactgtcagttaataaatatcattccagatttgtttgtttgttaagatggggtcttgctgtgttgccaaggctggagtgcagtggctcttaactgttgtgatcacagtgcattgtagcctggaatttctgggctcaagtgatcctgtttgagcccaggattacagctgagattacaggcggtcaccaccacagttggcctcattccagttttaaagatgaggaaactaattcagagaggttaagttaaaggcagatccagaatttgaacttatgccagggtagcagggtcgtggatgtttttgcggaaggaactcacacacagtcctttcctctgaaagggaaagcacttagagtctcacggccagccagctctgcagggtgccttggttgtggctctaatgagacaaggccacatattagctttaaataaaccaatgaggaaacagtgacaatgaaagatgtaacaaggcatagcggtcagtctcctgcccaagactgtgagttccttgcagcaggaacaaccatactcatatttgtatttctggtacctaacactgggtcggtaatacgtactccagatgcaggccagttgcagtggttcacacctgtaatctcagcactctgggaggaggccaaggccacaggattgcttgaggccaggagtttgagaccagcccaggcaacatagcgagacccaccgcccccacccctattaaattaaaaaaaaaaaaaaagatgttgttggtgaataagtgagtaaattaataagtgaaaatttggggaggggtggagacctagcaagggaggcaggaccaaagccagggtttctggcatggtatccactggagagtggtagccagtggaggagcaagaaagaaaggtgtgggtttgatttagacaggtggagtgtgattctagtagaaatatttagtgggaaaattgaaatgaggaagagagattaggattggaaatacactggaaacttctcttgaattggaaacctggaacatatatccttagaatgacagttgaattatttcaagaagttttcaaagaaatgctgttaaatcatgtggcagacattattctatagttattttagactttacatctttttctctcagcattatgtaatgggaaacaattttatattacagaaataagagattgcagggatttttagaactaagctacatataacatacacgtgtaaatgatacctcactgtaaaccttctttgcctcagtactgtgaataactttggaaagctaattaaagtgaaaattcttacttagatattataaagtagaaagctcaggttattaatgtagaaatcacaccagggtcattgtgtcataaataagcaagatctttgtcattcaggaatagttcaagctgaaagtcaataaaatcaaaccacatgaaacaatgggatgggggtaaagtagaatgatatatatcttgatactaattagccttttcccccgttatttatttaacaattttactttgaggcatttaaaagttcactgtctatattaataatcaccaaaccttaattggagagattatgtttcatgtcatccatattagaagttcagtttcatcttaataaagtcaaatttgcaatattttaggaaataatttctttaagatactgcttttttccctccgctcccctcccctcctctcctctttttttatgagattgtgtctcactctgtcacccaggctggagtgcagtggcgcagtctcagcttactgcaagcttcgcttactgggttcaagccattctcctgcctcagcctcctgagtagttgggactacaggcgcctgccaccacacctggctaattttttttgtatttttagtagagacggggtttcactatgttagcctggatggtctcgatctcctgacctcatgatctgcccacctcagcctctcaaagtgctgggattacaggcgtgagtcactgcacccgaccttcttttttttttttttttttttttttttgagatggagtctcgctctgtcgtgtaggctggagtgcagtggcacaatctgcaatcttggctcactgcaacctctgcctcctgggttcaagtgattctcctgcctcagcctcctgagtagctgggattacaggcacccaccaccatgcctggctaatttttgtatttttagtagagatggggtttcaccatgctggccaggctggtcttgaactcctgacttcacttcaggtgatctgcccaccttggcctcccaaagtgctgggattacaggtgtgagccactgcacctggctcctttttcttttttttcctttaatgatgaagcaccctctttaattaaatatgtgtaattttcgcctggcatggtgactcacacctgtaatcctagcactttgggaggctgaggctggcggatcacctgaggtcaggagtttgagactagcccggccaagatggtgaaaccccatctctactaaaaatacaaaaattagccgagtgtggtggtgcacacctgtaatcccagctactcagaaggctgaggcaggagaatcacttgaacccaggaggtggaggttgcagtgagtcgagatggtgccattgcactccagcctgggcgaccgagcaaaactctgtctcaaataaaataaaataaaatgaattaatatgtgtaattttctaggtcggcttcctcttctatctatagaataaattatttattagaaagacttagggtgttttcattatatctactagaatttgcaagaatgttgatggttacccttatgttttaaatttaacttttcctgtttaagtcttaatatagttgggaattttcatgttattaataaaataattagaacagccagaaaggactattgagattgtttaatatacttcccttgttgtacatatggctaatctgaggtcaggagaggttgcagcctattaactaaattatttgaagtttgaaattatagtgcctaaaaaaaaaaaagcaaggatacctttaatcttttaaaatgtatttcattgtttaaaggtgtgtttgggcatttgtttcccttttagtttttgaaaaatttccaaaattcagttgtattccttaccttttaaatatttttgtctttcaggagtcgtaagaaagcagtgggagttgaagtcattgtcaagtgcttgcgatcttttacaagaaaatctcactgaatgatagtcatttaaattggtgaagtagcaagaccaattattaaaggtgacagtacacaggaaacattacaattgaacaatgcctcagctatacatttacatcagattattgggagcctatttgttcatcatttctcgtgttcaaggtaaatcagtgttcattttagtaatgtatgtgtgtatataaaaagcactatttcttgcttctgttctttcaactcatccctgtttgaatagttaggcccagcctactagggcagcttttaggaaagaagcaaagatgaaacacgtgccaaataattttttaacttggctgtgatggaaacattttcaagtatttttgaaatctcagtctgagtctgtcttctccttcacaacataggcgtaatgatacacagcattaggtcttgtgaggattaaatgagataaagtatgtaaagccacctcagttagtagctgaaagacagggtaataggtagtccaggctgagcttcaaaattcctctctcctttaaaatacaataaggagcaagtgtaaataataattgaaaaatcattttattggccaggcacagtggctcacacctgtaatcccagcgctttgggaggccgaggtgggcggatcatgaggtcaggagttcaagaccagcctgggcaacatggcaaaacctcatctttaccaaaaaatacaaaaattagccgggggcctgtaatcccagctactcgggaggctgaggcaggagaatcacttgaaccccgggaggtggaagctgcagtgagctgagatcgcaccaatgcactctagcctgggcgacagagcaagactcttgtccctgccccaaccaaaaaatttcattttattgttgttaaaagactttagaaagataactgacacttgtctgtgctgaatactaaaatttcttcatagagcactgacagtttgtttatgaccaataaagtaattttgctactatgtgttcacagcttagaactcccaaacaggaagttattgtgatgactcttaggaccagatggcctgtatttgcacataagctttttcctgtatggtttaagtaggataatattttaagctgaaaagacagtactgttttgcaagaggattttagataaaacttactggatgtcttcgttctcaagttttttacttcacaggttgctttttcctaatgttttgatcacagtgatctggattaatatctgctgttaagaagaaacatgattaacaccataaagcttttgatattttcatcttttttttttttttttgagacagagtctcgctctgtcaccgaggctggagtacagtggcgccatctcggctcactgcaagctccgcctcccgggttcacgccattctcttgcctcagcctcccgagtagctgggattacaggcgcccaccatcacgcccagctaattttttgtatttttagtagagacggggtttcaccgtgttagccaggatggtctcgatctcctgacctcgtgatccacccacttcggcctcccaaagtgctggcattacaggcgtgagccactgtgcctggctgatattttcatcttaaagcacaaacatagaatgaaatctatagcttctttttattttgccttagtattataacaatatccttagtattacaacaatatccttagtattaccatgctaagaatacagagccttcagcaaaagccacttttacttgtgaaacaccaaattatttagtacaatacctttacttcaatatctgttacatgccttgttgatcagcatcaaccaaagctgctatagttttgaagatgagttaaattcatagtaatattatatttgctacctcacttccaggtaatctccattttggcataaatttttttaaaatctgtttagatcacacgtaggcaatatgatacaaaattctcagtcttcgccccagttcacattgttctataataaacttttattaggtggaataagttggtaattagttactacgtaaaagcaaaagatcttattaagaattacatttctctgataaagagtgaaatttgttacatttcctttcaaaaaattattttgatagttgcttcaaataacacacaaatgtttgctcttaaagctaaaaccaatgtagaaaagttatttctgagagatcattaggaaggattgtagaatggtattaatggaaataacttctgactttagctctagctttatcttgttttgaattatgtctcaggaaaataaacttatctgtaccttggtttccttgatgtaaaatagaaataataatgcttatcctagatataaacaagaatgttttgaccatcaactgttagggtatagatttaagtgctttacattgagataaagttacttaggtttgaacagaaaaatgagtcatctgatattaacagctgatagatacttagttcttattttttaagacttggtcacaaattttacaacaggatatattaatgttggatagatatgtagtcccttttttggattttgtcacaaatttcagaaatggattttagttttaagtaactaataatgacttcaatagagatttatttttaacataggtggtagatgtttgctgtacattcagttattgagtagtgtcaaggctgacatgtctgtaattttcttgacatttcccttgtggttcccaagtggttactattatctgcatttgaggcaggtaaaacggggaaagggtcagcactggcctcaactagacctgataccaggaaagcaaaagtgtcacagattttgtcttaagtcttaatcattcctaatagcaagagctactggaaaacagagaaacaggattgtcacaattgtcttaatctatatccattgcctagggctgggtgtgttgttcccccaaacaaaatcagagtttggttagctgggaaaagggggaaaataggtatcaattggacaattaaaaggatctgggagagatttaattttttccatcaattagaatgttttcctctacaaataattaaaaaaaaattaaaagagcttaaacatgacattttgggctaggtgatttttatttttttaaaaaaaagtttgaacaataaagagcatgtagtaacacacaggaagtctgtatataaggggactgtagttggttatgtggctcatcaagacccaagttctttgtcttttcaactgtgacatctctaaatgtcaggttagccacagtgtcacagtgtggctgctgagagactagacatcacatgcagatgaggtaagcttgagttgacaatgctcagttaaagaagagggaaatctgtttgtgtctctttttaattgataaatctttccccattcactcacttcctctccccaacagacttccttctaatcttagtggccaaaattcattatatgctcttgtgttaaatcactggcaaggggaatggaactaaaattgttggattagaccaacgattatctctgctgagagtagagggctgcgcttccctgaatcacgtggaggaggggcagacccttaatgtgtgtgtacatgtgcacatgcctgttgccagcaagggaaggaggagaagaataagagtatctgttgctgggtaccacatttgttgacctgacatcatacatatgctaaaatgctcatgttgctatgaaattttcagttccttttcaaagggttctataccccagagttgcatccatttagtacatgcagctactaatccaggacttctggctggtgggaagccctctccttcgggtccaggtgcctcttcatggtccagcagtgtgtggctaaaagcaattatcagtgcacagtatatccagtatccagtgataaagatgaagtgggataagtactatataaaacttccattcagaggaagaaaaattggaaacaacctcagtattcactgctccatagcatgtagattaatgatgcttaacctgtttgtcagcctccagttttattttctgggaggatttgccttgtctctggtgttccttggctagtgtttctgtcttcatggtcacatctgagctggaattagtggaggatgatctttgtggagactgaacagctttagcggcctgctttctgttagtatggaggtctgattactggaaattgtcctatggattgaaaactcacagcctgactgagtcagcctgggatatctttggaagtacagttcctgtaaagttgtagtggtcctacattctgtttgctctgatctctttggtttcactccattaaacacagttaaatatcttgtcttgatgtgtgttctgagaatttctgacctagccactggcctctgctttgcctgttctcctggcctttggtttagtgacctccgctctgaggcactctgctcctttcccatgctagaaaatgacctgctttatttggtattgtagcacttacctatgaataaatattaaaatagtaccaaatgtcagtatttattcatctttattgtctttctccgtcgaagactgtaagctttaatagatatgggactgtgttttgtttactcttctagtcacccagggcttaaaacagtggctaccaccgtgtactcactcagtacattttggtttaatggatgaatacagttaaagtgaaaaaagcaagttgcaaagctgctttcttagccatatatttttacactgaccaacccagtaacaacaagcacctgtaacaacccagttgtagtatctgattgtcttttttcactaaggatctagaactccttggagaaatcactgagttcaagttcggcagggaaagagcaaggtgatcttggtattttggccagaaagcaaggaaaagttcaaaggattcagtgaccagtttgaattgaatactaattgtagtggattcaaacaaatcaaatatgtttaaatccacgtgtttgtaataacacttaagaaaaaaactagttagggctgagggctgtgacttacacctgtacatgccaacacttgggaggccaaggcaggaggatcacttgagcctcaagagtttgagaacatccacggctaaactgagagtccctttaaaaaaaaaatagtttgagaccagcctgggcaacatagagctggtctctacaaaaaaaaaattttaattagctgagtgtggtgatgtgtgcctgtattcctggctgaggtgggcgggagaatcacttgagcccgggagcttgaggctgcagtgaaccaatgatgacgccactgcactctagtctgggcagcagagcaagactctgtctcaaaaaaagaaaacaaaactagttggttactgttaaaagatgctaatgaagtcattaattttgaaaactggtaaatagagggagaaatcaaacattaatcttgcctttctaacatgaactgtgccacctgtatccaattagtaggtgagggaaagcatctcatagatgtattccaagtcataaaaaagagaaatgataggattagatacattattttatactatgccgattgaattagtgaatctagaccttaaaaacagagataagcaggcatttggttccctcctgcccacaacatacagagcagctgcatttcagcgctcaatagacacatgtgacttgtggctaccatattggacagcacagctctcgagctaattaccatttacaaaatccatagagaacaagaggacatgttaaatgatgccaggaggatgtgatcagaaattccagactgtggtaaatactatactagtaaataccggacaagttacccaatgtctacaagtaaatctcaaggacaggaagaggcagaagaaactggtagattaagagacttggagacaaccagcttatttggatcctgattcaaggaaactactaaagtaatttgtaatatttatgatacaattggaaattagaaagcaatttataacatttataatataattggaaatttgaacattgccttgatgtttgatgatattggtaaggataaggaattactattaatttttttaggtgtgataactgtgttttttttttaagttcttttagagatacacattgaaatatttacagataaatggacatatctggtattagcttcataattatatgaaagggggagggagtgaaacaagaagggccatgaattcatcattataaaagctgggctgtatgggtatgtgtgggttcattgtacagttttctctacttttataaaaggtttctggccaggtgcagtggctcaggagttcgagaccagcctggccaacatggtgaaaccctgtctctactaaaaatacgaaaattagccgggcatggtggcatgtgcctgtagtcacagctactcgggaggctgaggtgggaggatcgcttgaaccagggaggtggaggttgcagtgagccgagattgggccactgaactccagcctgggcaacagagtgagaccctgtctcaaaaaaataaaaagttttctggaagaatacttcatttcaaacatatatatgtaaatgaatagaaaaaggacaagaagcatatacatcaaacggataatggtggttatgtttaaggagtgggaaggggattagatgggcccaaagaggactttttggtttacttgtggggctcaatttttttttggatgctatgagaatatattgttgttttatttgagtattttaaaaactacttttaggaaaaaaaaaaaaaaagacccaacacggtggctcatgtcatgtctataatcccagcacattgggaggctgagacgggcggatcacctgaggtcaggagttcgagaccagcctggccaacatggagaaaccccgtctctactaaaaatacaaaaaattagccaggtgtggtggcacatgcctgtaatcccagctactcgggaggctgaggcaggagaatcgcttgaacctgggaggcggaggttgccgtgagctgtcatgccactgtactccagcctgggcaacaggagcgaaaacgccatctcaaaaaacaaacaaaaaaaccatcaaaaactacttataggaaaaatacttatttcaagcatatgtctaagtagagagaataatataatgaaactccatgaacttgtcactcagttttgacagtatcaactgatgaccaaggctgtttcctctctacccccatgcacttctccctcacccacgtcacccttggattatcgtgggtaattttgaaataatatttcagttaagtataagacaccttggctgggcacgttagctcatgcctgtaatcacagcattttgggaggctgaggcaggcagatcacttgaggtcaggagttcaagaccagcctgccagcactttgggaggccgaggtgggcggatcatgaggtcaggagatagagaccatcctggctaacacggtgaaaccccgtctctactacaaatacaaaaaattagccgggcgtggtggcgggcgcctgtagtcccagctactcaggaggctgaggcaggagaatggtgtgaacccgggaggcggagcttgtagtgagccgagatcacgccactgcactctagcctgggcgacagagcgagactccgtctcaaaaaaaaaaaaaaaaaaaaagaccagcctggccaacatggtgaaacaccgtctctactaaaaatacaaaaattagccgggcgtggtggcaggcgcctgtatcccagctacttgggaggctgaggcaggataactgcttcaacccaggaggcagaggttgcagcgagtggagatcgtgccattgtactccagcctgggcaacagagtgagactccatttcaaaacaaaaaaaacaaaaagcaaaattcctcaaaggccacatactgtgatcataatgcaataaaaggagttcaacagtgtaaactttgtttgagcgtatgacttttttttttttttttctatttgagacgagtcttgctctgtggcccaggctggagtgcagtggcacaatctcagctcactgcaacctccatctcctgggttcaagcgattctcctgcctcagcctgctgagtagctgggataacaggtagacaccaccacactcggctaatttttgtatttttagtagggtttcgccatgttggccaggctggtttgaactcctgagctcaggtgatccacccacctcggcctcccaaggtgctggggttacaggcctgaaccaccattccctgccagcctgctgggttcttaagcgatccttccgcctcagccacccaagtacctggaactacaggtgtgctccaccacacgcagctaattttttaaattttttgtagagaccaggtctcagcatgtttcccaggctggtcttgaactcctgagctcaagcatcctaccttcctggacctccgtaagtgctaggattacaggcatgagccaccatgcctggcaaacacatgatttttttttttttttttttttttttttttttttttttgagatggagtctcactctgttgaccaggctggagtgcattggtgtgatcttgtctcactacatcctccacctccctggttcaagtgattcctttgtctcagcctcctgagtagctggattacaggctcacagcaccatgcccagctaatttgttgtatttttagtagagacaagagtttcaccatgttggccagactggtctcaaactcctgacctcaggcagtccacccgcctcggcctcccaaggtgctgggactacaggcgtgagccaccgcgcctggccaagcatatgatttttaatgcaataactatattcatgtttctagaagcttttttttgccattcagtgacattatggatgacactgcatgtcagtatgtgtcggacatgtgtcagcatgtgtcggaatgtatcaacccatttttgataatgggttcagaaccaagtttgattaatgttaactgatttatgcagtttttatgttcaactgaaatacatctaactataattttttattggccttccaaaagtgtcataaaataagcctaatcattcacatatcctatcagatgtgaaaagcccatttctatgctttctggccctgccgcaaaatcttttcttttcttctccctttgattttcctcctagaccaacgtagtatgacagaactttgtttggtgatggaaatttctatatcagtaatttgcaaactatagcccacaaactaaatccagcgcattgctgcattttgtgctgctcatgagtgaagaatggtgtttttgcatttttaagtgattgaagaaaaatcaagggaatatttaatgacacatgaaaattatatggaattcaaattttattatccataagtaattttattggaacacactcatgttcatttttttacatgttgtctggctgattttgcattgtgtcggcagaattgaatagttgtgacagagaccttggggcccacaaaaccaatacctgttttctatatctctgctgtcttgtgtgatagctactagccaaatgtggcttttgagcacttgagttgtgactagtgtgggtgagaaactgatttttaattttacttcattttaattcgtctacattttaagtcacatgtggctagtggctaccatatgggacagcacagttgtagacatgccaccttttccctagttcttgcttccttgtacttgactttccttctgctgatgtcttcctggtttctatttaattaatgatgcagactgttgttgcagaattcattaggctaccattgctgattatctcatatgtatagtgcatcagtagcccattggtctcaccaaccgtttgccatctgagttctgttgtagacattctatcttaaggttgcggcagagggcatttatttgctgtagaaaaaggaagccaataaattattgggaaaatatgaaaaattacttagccaggaataaaaatctagtaaaatcattgatgccaaaaattgctgttgatgacaaggacctgtaaatgtgcctgtgtatggtcatgtgtctcttgtaactgtttgtctctttgtatgtatatgttttcattttttcctgagatgttatacttaaacatgtaagctattaaatattttgtgtgtgtttgttttgaaatataacctatacccccagtccaccccagggctcgtagtttattctttgtaaatacacgggacttgtgggtggcgagagattgacatgttcagaactgacagaaggccatgtgccaagtaaagtgatgatggtgaggcctgcaggacccagatcctgttgggccctgggagcacacagtggaggttggattttattctgagtgcattgtggagccattgattggttttatataggagtgacagatttgtgtttataaaatgtctctggctgctctgtggaaaatggattgcagggaccaagagcagaagcagagggaacagttggagacttcttaccttagtagaggcatgatgtgatgggccttggtgacaacagcggagttggagaaaaatgaaaacaattgacatacattttggaggttgagccaaaagactttggtaagaccaggtttgaggcaaatcaagagttcatttaagacaagtcagtcaggagatgtctaagcaggtcatggctagagggggtacatccaggaaccatcaacagagtgggcgctgtcccctagggagagcacagagaggctctttcctgttacttttctttgtattcaatatctgcttggtgaaatcttgcaagtttttaagatgtagcttagatttcattacttttgacacctaagatcagtttgagtttgacacctaggatgagccttttcctttgtttacatgtaaacacctccgtattttgtcacttttttttttttttttttttgagatggattttcgctcttgtcgcccaggctgaagtgcaatggcttgatctctgttcactgcaacctccacctcccaggtcaagtgattgtcctgcctcagccacctgaatactgggattacaggcgccttgccaccacgcccagctaattttttaatatttttagtagagacggggtttcaccatgttgaccaggctggtcttgaactcctgacctcaggtgatgtgcccactttggcctcccaaagtgctgggattacaggcgtgagccaccgcgcctggcctttgtattttgtcacttttcacattgtatttatttgcttttgtgcttattccccctctgctttccaccaagtttctcaaggccacatatgtggttttgatgccacatctttgcgtttctagcatttaataccttgcctgcacataatagacccctactaagtattctgttgaatatttggcaataacataagctccagatacaactactgtaattgagttttttgtctcatgaattcaaatagtattctaggaagtttcatataactttgagttttttcatgtatcagtgatcttttagtgttctgatctttgttattagtaacatcttcatttgtatactattttacatgtagttaagcactttagtaaatattcatttgatctacctataacctcttgatttgaattaggcaggaattattatccccattttctatagatagctgaggttcagagagtaacttatctgtgcccgtaactgcgacttgaacccttcacttcttgctgttatctcaagtgatatttctgccacactaaactgctttttctgtgtcactagatttttgaaaaatcagttgctgtgatatattatatactgtttgttttccagagctgaattgatacgtgtcttctgttaatgtaataggattttaaagctggtcaggttccctcacctgtcctctagtcctgtagccttatagagtaaatgaagcctggaaaggtgacatggcttgcccaagaccatccagctaggtaaagcggggtaggcccatggcaaaacagaatcccagtctcctcatttcctgctcagtggatttcttcccttcctgtacctcctgcttcccccaccccatcttttacagttgatgtttctaacataaaggaggtctttccgctttgtagcaatcagatccaacggaagccttgacattatattacggaatttatttctgaaaggagagtggtgtggggggcgcggggatgagtaatatatgtatgtacacaaacttccagctttttttttttttttttaagtgttttctctcctggccgggcacggtggctcatgcctgtaatcccagcactttgggagactgaggcaagtggatcacttgaggtcaggagtttgagaccagcctggccaacatggtgaaaccctgtctctaccaacaaaatacaaaaaaattagctaggcgttgtgtggggtgcctgtaatcccagctactcgggagtctgaggcaggagaattgcttgaacctgggaggcggaggttgcagtgagtcgagattgcaccagtgcactccagcttgggtgacagagtgagactctatctcaaataaaaatgttctctatactcattcagtagcaaattcttttactaaatattcggtataagaaagtgaaggttattggccaggcatagtggctcacggctatattcccagcacttcgggaggctgaggcgggaggatcgcttgagcccaggagttcaagaccaacctgagcagtatagggagaccttgtccctacaaagaatttaaaaattagccgggcatggtggcatgtgcccttggtcccagctactccagaggctgaggtgggaggatcacttgagcctgggaggttgaggctgcagtgagctctgatcacatcactgtactccagcctgggcaatagcgtgagaccatgtctcaaaaaaaaaaaaaaaaaaagtgaaaattattgaaactgaaggcatgtaatcatcaaaacactatttagcagcactttttctgttacctgtgtgtgcatatgtgatattttttgtcttttcagtagtttatctcatcagtatggtaaatgtaaaatcaagtctgtgttgtgtcttgaaccacttatttaacattcataatgaaatacatatacacttgtctgtttggttccacctttcattcccttgagagtaacccacaaagaatggcctagctgagtcagagagaggaagtaattactagaacagtttttttagttccgttctgcttccagcctgaaagatttagtaccaaatatgacagtatctgtcactgcaggctgctagactctagtgtaagaacatagttctatttctgtgagctaactgctgcccttctataaccttcagtttctgccagcatcgtctgcattcaaaccaatgacctcgaggtgaaaatctccagataacatgattggtccccatgctctcatgatttccttacttaagcaattaaaggccaaagcaagatgcttagtaactccttttccacatagaggcacaaataaaggaaagctggtcacaagttttgaaccaaagagttaaaagaagaatcataacttgtctctatttaatgattggaaactctcacagacttctgtgaagtctctcccccttttgtacctttcttacaagtgatgactatatacttttacctggcaggggagagaccacggtcacgaaggtggttttcccagggcgaggcttattcattgcactccagatgtgctgacccctgcgatttccccaaatgtgggaaactcaactgcataattgtggtggtgggggactgcgttcatgcttttccctggttaaattaaaaaatttttaagttattttaaaaatataaaaaacaagatttgactgtattctgccttgcgccactcttgtttgtctttcactagtgcaaaaattgtgatatagctgtcttcatgtaccccgcaatacctggtgcagtaattctgtgcataataatgtatgtctgtttgttgtatgaatgaaatttatatttctaaagaaacatgctagctacaattattgtgataagaaagcttaacaactttttctcattgaaaattgtcacgaaacaatgagcttttcagaaatgatttacttacaaattccatatttgaatgcaggacagaatctggatagtatgcttcatggcactgggatgaaatcagactccgaccagaaaaagtcagaaaatggagtaaccttagcaccagaggataccttgccttttttaaagtgctattgctcagggcactgtccagatgatgctattaataacacatgcatgtaagtattttatgcagcccttcttaagagttaggagaatagagttgcatttagtgctattttaagaattattaaacttgtctgcggtttttttttcattcatatatagtatctttccagaaagccaaaaagccttttgttttgtatattagaacattattccattaaatgattgataggtgagttactatattagaattatgttataatgcagcttttaaaataagatcaaagggatctagtatttaacatctgagtttttaatgatcttttaatcttaaatttattgatgctcattttagaaaacttagaggttaccaaaaaagaaatcagaaaactcactgacaacctcctacttctttttaatttaaaaaaaaattttttttttaactatagacaggatcttgctatgttgcccaggctggtctcaaactcctgggctcaagcagtccttccacctcagcctcccaaagtgctgggattactagggtgagctgccacacctggcctcctacttcttaattagttgaaatattttgcagatatatataaatcatattgtgttaattaattttatgcttttttcttacctgtgaatttaccaatccaaatctgatttataaaatgattttaatttttctagtgtatttcgtgttagctgcacaacatgtttatatatgatcatgtaattctagtccatatttgttggaaacattgacatattgacttaataagaccaaaaaaaattgcctgaacaactcaacctcatcagtcaattaattgtctccttgttatagaggcaataatgaatgtcatgttttatacttttaataattgtatgttccctgaatggaccagatagaaagcatgaaactttacacgtaaactcttgaacctgcatgacggtcatcgtgtcttaggtttgctgcttgtcccctggtggtggtgggctctgcgtggctgactgtgactagttgttcatttttaccttggtgagagtttgccagcagggaactgctctctgctatgtcaccaaataatgttttgctaaacttcttgtctgtagtacctgcctgatgtaatgggctgtctgttagtagcttagtaacccagagtaaaactgaatcatccattttaacagaattctgccccacacttaacattttctcctaacagaaaaccaagaattctgcaaaattcttctaagtagaagcagcacaattcctgatattaacaataaataggagtacagaaaaagcttttagaaatttctcccatacctgttaaagtctatatgaatatattaaggggaaactccaggatgctaacactaaaataagaatttcattatatatgtatgtaaatttattgaaaatttattcaaaagtcctctccctgttttcccatcatattcagtaaaaggtgccttttagtccccttttttttggtcattaagcctatttgtatgtttcagagaaaagtttgtttttatctattatcatatacaatatggaagtactgaaaaaatgggtaaaaagagacaaagttattttaaagtatgttttcaaaacatgacataaaattttataaatcagctttctgtgatcacatgactgattagcaaagagaagtcacataactcctatgtggaggacttgtttaattgaaatccttttcttcttgacaaagggttgtcactggccttttagatcttggctcagacataactttcatttgtcttaaaacctctggcgttgccaataaatcacgtgtgaatgcaattctaagtcacaaaacaaagtattaaaggccatctgtacctgttcacattcagactcaaatttcgttagtactttctatgtgaatttatgttttgttttgttttgtttttttctgttttagaactaatggacattgctttgccatcatagaagaagatgaccagggagaaaccacattagcttcagggtgtatgaaatatgaaggatctgattttcagtgcaaagtaagatataatttgggacccatgagacaaagaagggaggggccatatgaaagcatcgatttcccccaggagaaacatgcctggtgtacacatcgctgtatgttcacatcagtaaatatattggaggaatacctactgtctagattctgtcctgtattcatatgtagaatttataactaaatcatttctgaaaagctaattgtttgattacaatttccttttttatttccatagacagcacctggctctgttgcccaggctggagtgcagtgctgcgatctccgctcactgcaacctcaagccagcctcctgcctcagccttctgaatagctgagactacaggtgcatgccactatacctggctaatttttgtattttttgtagagacaaggttttaccatgttgcccaggctggtctcaaactcctgggctcaagcagtctgcccgcatcggcccgcaaagtgctgggattacaggtgtgagccactgtgcccagcctgattacagttttctttgttctctacttgggaggctgaggcagaagaattgcttgagccggggaggccaaggttgcagttagccgagatcgttccacggtactgcagcctgggccacagagcaagaccctgtctcaaaaaaaaaaaaaaaaaaattcttttttctttttttaaattttaaccgtctttggctactgattacaattttcaatgagaaaaagtttctaaactttcttatcacaataattgcagctaacgtttctttaaaaataaaaattttattcaagtaatatgattatggtaatttaagttccaggttattttaccttaaaaaaagttttaaatcatcctaggttgtcatgactgcaaaaaaattatattgtcacacttatttgtagattataaaatttactgagaagacttttaagatagtggcagtaacctttgtatcactctgagacaacttagaaatgttaaagatatactgcaaactctagggtaaccactaaagttgaaaaaaaaatgttaaggccttgtaaggaggtgtcagtggagctctttaaaagcagcagcaaaggaatcaggatggtaatagtttatgagcatcctgatggctctgggttataaacctgatctcttcaaaattctgcatagtgattttgtcccaggagatccttccagtgtttctgaaaaccagctccagatagaattgtttgtgcataatttaagtctcagctatgttagaaaattgttcctattatttggaaattctcaggatggaggccgggcgcggtggctcacgcctgtaatcccagcactttgggaagccgaggcgggtggatcacgaggtctggagatcaagaccatccggctaacatggtgaaactccgtctctactaaaaatacaaaaaattagctggacgtggtggcgggtgcctgtcgtcccagctactcgggaggctgaggcaggagaatggcatgaacccgggaggtggagcttgcagtgagctgagatcgcaccactgcactccagcctgggcaacagagcgagactctgtctcaaaaaaaaaaaagaaaagaaattctcaggatggatagaaaccttaaaggttatgtttcaacctctcagctaatgtttggaatcacccttgttgcaaatgactgcaaatctatcttcctttctgactctttggaccatagagaacaaacctaatctctctttaagatgacagccctttactaagtaaaaaaagtgcttcatcctactagtctttgcccagtgaaaataattgtccataatgacctcaactgctccttatatgatcagctttagagttattcagtctccacttcctcagtgtaatatgcagaattgagtgtgatatgaccaaggaaaaaagtagagaataaatagccctgttccctttttctaaacatagtcttgtgttagatatttggcagtcatgccatattcttgaaccattgagccttctgtccgctgaagtccctatgctactcactcatgctgctgctaagccacatctcctccactcttcattggtgctgttggtttcttcacacaaataagtagatgggaatggaatgaggttttcctatacagttgttacatacttgtctttatgaattttatcgtataagcattaatcctttgctctaatttgttgggatttaaaggatgctaatttcgttgttccagttttaggctatttgcgtatttatcaagcacacatactatacattttttaatcacttaaaaaattgaagaaagagctatggttagggtactgagcccagcagtaataaccagtgttcaacaggcccctagtgtaggcctgtcctaagctgaattcaccattataagttagttgttaaacttgacaagctgttcaaatctatatactatatatgtgaaccttcggacaaggtgctctgctctcgttttctcatccatgaaggaattactatgaggatcaaatgagatacatgtaaatagtttagcacaattagcacatagtaagggcttaatagatgttagctttgaccatattgattctttaatagagcagtcttcatgctgttacccatatccctgggtacactcagactgtgttatacaagggtaacgggcacgttgatagttttaagggaatcagtttttggatcctaaacttcagtaggtcctgttgctgaatatttctctgcctgagaacagaacttctcaagcagttctctttcccttagtcacttttcatagtcaacccctcctagtttacaaatagaaggcctgaggtgtaaaacttcaaggttccaaacggtgttgtaattcgaagtaaaggcatcagtgtaggctatgtcgggatatcaaataagtgtttacatgacagatggttttcaattgtttgctttcaaccaagttgctggatcattgaaaataattttcgatgataggatctttatggcacttttagcatatgctttggaaggactttaaacaattatgggctgatcgtggtggcacggtggccccagcctgtaatcccagcactttgggaggccgaggcgagcagatcatctgaggtcaggacttagagaccagcctgatcaacatggcgacaccccgtctctactgataatacaaaacttagtcaggcgtggtggtgcgtgcctttaatcccagctacttgggaggctgagacaggagaattgcttgaacacaggaggtggaggttgcagtgagccaaaatcatgccattgcactccagcctaggcagcaagagtgaaactccatccaaaaaaaaaaaaattatgggacaatggtataatagtctccttccgtgatcatcatcttgcttatgtgaatacattgtcttgatgatgacaaaaggaaaaataagaataagattaatgatgaatcttctcactctagcagtaatttttattcatgaattcgtgaactgatttgtttcaaaagtcccatccatatcattaagaaatgcctggccaggtgcagtggctcatgcctgtaatcccagcacttttggaggccgaggcgggcagatcgcttgagctcacaagtttgagaccagcctgggcaacacggcagaaccccatctctacaaaaattagctgggcctggtggctcacgcctgtaattctagcactttgggaggccaaggcaggtggatcacctgaggtcaggagtttcagactagcctggccaacatggtgaaaccccgtctctactagaaatacaaaaattagccgggcgtggtggcacactcctgtaatcccagctacttgggaggctgaggcaggagaatcgtttgaacccaggagttggaggttgcagtgagccgagatagcaccactgcactctagcctgggtaacagagcgagactccgtctcaaaaaagaaaagaaaaaaaaaaaaaaaagctgaggtgggaggatgacttgagcctgggaggcagaggttgtagtgagctgagatcatgcaactccactctagtgtgcggagtgatagctagatcttctatcataaaaaaaaagaaaaagaaaaaatgccctttccaataacattttcttaagtttgtatttaatgaagattgtaacatatatattgttttgatcaattttatgctaataatgattatgataaactagaataattttctaagacttaaagacatacagttataggaaataaaagaatttttatgtacttatctttgatgtggacagttatatattactttaggacgtaattatcatgggagatattgaaaggaaataagagttcaaggagaaataagagttctagtgtaaaatttctcattgctaaaagaagcatttgttcatttattctttaaaatgatgataatgggtatcaaattgcaatgctatttagattctactgaatgcattaaaaaatgatgtaacacttctatttcaaaatgaggtaacaattctatgtcaaagtgtcattatgtacagtaagccagaaattattaatatattgcagccatttaaatttatggtgaaaatttttaagtgtcacctgaaaaatacgtgaaggatacgttgcttttaagaattgggttacgccagcaagcattttgaccagcacttatctaactttctgtatttcttggtaaacgtcacccaagcacagcactcacccaagcacagctctgtcatgctcatcctaaccctttccccagtgtcttcacgcactgccatgtgtggcacagaacagatgtgagtgcctctcaccaggcctcgcgttcttccactccccaggctgcattggtaaattgtgcttattctgtttcctcctataggacaaattatttttcagaaacctcactgccattccttgtaacttggcgtcagttccttcctcatatactgtctccagcctgagcacactgaataagtttatttaagtcagaatcacttaattcatcagtgccaagtaaatttgtttcccacaaaaattcatattccccacataagtctagaaatacaaaattgacttgggcagagggtacgggtggagagtgcaggaaaaggaaaggctgtgtcacccaaattcataatctcgacaaacccaatttttgcctacccagatacatagttaacctgagtaagacagacgtgagatgaggcaggtgttgcttattcttagtgaagccacaatgggtctttagggacttagaagttttttggcttagtctagaatctcatctgggattcatgtcaagcaagaggaagggaagttaatttattgaatatttgttatatgtgtatagtatcctggggattcagtatattctaccttgtttccccccaactactctatagagcagatttttttaaagacagggtattgctccatcacccaggctggagtgcagtggtgcaatcacagctcactgcagcctcaacctcctgggttcaagtgatcctcccacctcagcctcctgagtagctgggaccacaggcgtgtaccaccacacctggctgatttaaaaatttttttagagatggggtctcactattttgcccagcctgatctcagactcctccgctcaagccattctgccacttcagcttcccaaagtgctaggattacaggtgtgagccactgttcccagttcatctttttttaacctgtattttttagcacactaaagcctagagataaattacttgctcaagttcacaaagtgaacaactggcaaagctaggattcaaactgtttgattccaaaacccttgtattttctgtaatactatgctccttaatctgttggcagagtctatttttggcttctttttaaaaattattatttttagagatagggtctcactacattgctcaggctggacttgaactcctaggttcaagtgatcctcatgcctcagcctcccaagtagccaccacacccagtttaaagtctactttctttcccttttaaagaaaagggacgtatataacacatatatatataacatatatataaacatatatacatgtttatatgaaatgtttatataaaaatataacattccattatctattgtagtttccaacactccatctttctaaagtctttaaattacacctgtctttcagccatctctcttacaagggctttcatcttcctgggatataattcacctaggttagaatataggaactcataaggaatacaaacgcatcgtaagatctcttcgtacatttgggatgtcgtttcccacttagtagtgtttgagctaccttcgtcatccctgtcagcatccttcatagagaagaaaaaacaagacaggagttgaagaattgttcgtttttctccttatcatccactgtcatgtcagcagtacatctgttgcttggagaaaccccatgctgccaaagaaaccctttcttggtttttctttgcacttttctcttctgcaaggccaagctcattttagctttcctggaaccgtttttggatgcttgacacttctttcattcatcgttagttatatgattttcatttcctcctccatgtgttttctctgaatctgggattatttcagactctccagtttaaccctaacttttttctctctctccttatgatcatttaaaagtaaaaattgtttaaaagttattaataaaacttcatttaaaatataaaatatgtatttggacatttccaaatgctcttgaccatcttcccaacagaatctgaagtcacaggctcatgtttacctttttaaagtcatagctgattatactgaggcttttccttaatttccgcttacattcttgttacttgtgtagtgacaaacagttctttgctattcacatgttggtcagaatggcagttctccccaggctgcagcattcaacttgtcagatattgtgttgttaatccaataaaacatcacatgcaagtgctgctgcgcttccagtgactgtgtccttctctgtgctagctttctgctctcttagggacagtctccttgctggctggtggtctgtaatcagctctcaagaatgctttctgtagtttgtccttccctcaccatggatgctcaacttgcctctgcatcaggctcatgacttccgacgtggctggggtaggcagggtctgcagcgcctctgcacgctcagctgccttgctaaccagccttttctttggactacgacaccctccactttttagtctgatcttaaatctcatccacatctcagtaccacagtgagattatatgtaccagaccagtttatgattgtaattacctaagttcgggtttggtgttctaatctagtgtctaacacaccatccacatagatatgttcttaagaaaagccattttgcagtcttcactatttcagcacaaattttaatctttcaataatctgtttttacatataaaatttgcaggcccctttcactcactgaaatagaaattgtattttatgaatactaaaaagacatatcagtttaaaataccaaaccatttctaattttatcattactcttcttttaggattctccaaaagcccagctacgccggacaatagaatgttgtcggaccaatttatgtaaccagtatttgcaacccacactgccccctgttgtcataggtaggttagccgagaaaagtcggagcatgcttctcaaatatcttctctggttttacagtaaccaggctacctagaattgaacacgtcagattattttttcatttcaattgtttacattgtttacttttattgtcaggtccgttttttgatggcagcattcgatggctggttttgctcatttctatggctgtctgcataattgctatgatcatcttctccagctgcttttgttacaagtaagaagatatttattttgaagcaaaatattttgtcaaatattagatgtcaaccgctgtttgtaaagccagttgcagaaaccattaacttgtattctctggttgtatatctcctttatgtaactagactatagttctcttaagggaaaaggaccttactaccaattaattaattgggcacaatttcatacttcttgtatgttcatgattacttatgattttcttattaatggaatagtgagctttctggcatctgaatgttttcgatctgtcccaagaaacccactgtgttataattcttttttttttttttgcgttataattctttagaaatttggagctccagaattgtttgcatgtagccatgatttcagaagacagttgccaaaaaagaagagtaataagagacagtccctaatggatataaactttaataataaaacatcataccaacctagatacattaatgaaacaagttagtaaacccataaataaacaaacccaagtacatacagcaatttagcatataataaaggaaacacttcagattactgaggaaaagacgttcgcatacctccttgtttttattataattcctcaccctcaacaatggggtaccacagttgagaaatcgtgttttgggtctttctagataatagacttggaatcttctgttagggaggtgatgcgaaagtcatatgattattcagagtaggagatggggtcgagaggagagctccacatctgaggtagccatcatcccaaatggcccccagtgattctcactgcctggggttcctccccttggggccagtcccctcccataacacatcagggctgatctgtgtgacaaataggatatggcaaaagtgacttccaagtctacgttataaacagctttgcagctttcaccatggtctctgggatcactcactctgggggaagccaggcatcatgctatgtggacactcaactctgagagaggcccacacagggaggaactgaggcctcttgccaatacccagcctgcagcctgtcggccttggaagtgagccaccttggaagtgactgcaagctcctgtcaagctttcacatgagtgcagtctcagctgacatctgaccctgagctacccaatcaagtcactcctgaatgcatgatccacagaaacagtgagataacaattgctgttttaagccactcagtttgggagtgatttgctaacacagtattggataatccagtgtccgactttctgaaaattgactttcaagcagtcttcttggtgttattgtcaccctcaactttacttccagacataaccacaatggccagttccgaagttcttgggggaactccatagtataaactggttgcttcttggttttctcaatttctaacctaagaatcagactttttgggtgtgcaaagtcactgctcattcatctgcttcatgaattccaacagtgtttactgttattttatctccttttctccttgcctgttagataaagaagtttaaaactctttattgctgttttagtggactagtaaaagcaagcaagtatgctcaatcggttattttaagctcaaagtccctttgtcaaataactgaatctttgccagtaagacaggtgataatatctcaaggtgattttaatttatattttcatattaaaatactttttttatacattggtttctttattacacaagggcactgtaatgtatatattattttatttatttatttatttagaaatagagtctcactctgtctcccaggtggagtgcagtgatctcggctcactgcaatctctgcctcccaggttcaagcgatactcatgcctcagccttgcaagtaactgggattacaggtatgcactgccacacctggctaatttttgtatttttagtaaagacgggggtttcaccatgttgaccaggctggtctcaaactcctgacctcaagtgatccacccacctcgccctcccaaattgctggaattacaggcgtgagccaccgcacctggcctctaatgtgtatagtaaaatattgttgagtatgcttttatttttcttttaagaaaagaaccatctatatttttatttaaatcatgtattcattttggggggcctgtttttccattgaattgcatagatttttttctctttgatttatagaagctctttatatttcagaaatcagccctttgtaatatgagctacctatacttttctttttttgtttttttttcatgctgcgttacctcagagctacctacacttttcactgtggtgtgtcttgagactgcctgcagtgccttcagccacatagtaaagaaccctatcagccaggtgtgtgctctctaagcaatgggtaggatgtttcttaaggaaatctgttcagcccaagagataaaacctaaaaatactgctgttagggcccagtgaaatggtccaggcagattatcttacagtgaagcttgtaatcagtaaaccctacccatatactaacagcttgccaatcaaggtgtcaggctgtgaaggatactgatctctgagaaaccagaaacaagtgaggtgagccttgtgattgcccaccttcttctccctgaacagagtttcgggttgggcatcacagggggaacccaggtgtagccagtagcctgtctcagttcgaagagttgtgaggaagctaccaagcctagggaaagagcacctgaaatgattgagaaaacagtgtttggtgctcacacaaggctgggagtaggatctgttcacaccagctgtgagagttgaaaaccccataattcataggttttggttgaaggactcaggaggattttgcctcagtggtggggaataattagccctagactaaacatggctctggtctcaccctaaaagcaagccccaaacagatcacaccatttctaagtcactgtatcctagaacaaactcaacagtatttataggaatataaaaatatctggcatccaacaaggtaaaattcacaatatctgccatccaataaatgaatactatgaataaatgaatacatatataaatatggtccataatgagggaagaaatgaagcaatcaaaaccactgacccagaactgatatagaccttagaattagcaattacattaaaatagttattataactgtattttttatgtacaaaagttaaatcaagacatggcagattttgtaaaagaccaaaatgaaactttaggaaatgaaatctataatatctcagatgaaataatatactagatgaaattagtgacagactgtagaagaaaagatgagtgaacatgaagacataggaatgaatagagaatagtgagctgtgggacaacttcagatggcctaatatagatataattggagttcccagaagagaggagggacgaaaaacatacagaaataatgatcaaatgttttcaaatttatctattattattatttttatttatttatttatttatttattttgagacagagtctcgctctgtcgcccaggctggagtgcagtggcacgatctccgctcaatgcaagctccacctcccgggtttacgccattctcttgcttcagccttccgagtagctgggactacaggcacctgccaccatgcctaagtttttgtatttttagtagagacggggtttcatcgtgttagccagatggtctcgatctcctgacctcatgatccgcccgccttggcctcccaaagtgctgggattacaggcatgagccaccgtgcccggcctattatttttatttttgagacaaggtcttgctctgtcacccaggctggagtgcagtggtgcaatctcagctctctgcatactccacctgctgggttcaagcgattctcgtgcttcagcttcccaagtagctgggattacaggcgtgtaccaccaagcctggctaatttttgtatttttagtagagatggggtttcaccatgttggccaggctggtctcgaactcctggcctcaagtgatccacctgcctcggcttcccaaagtgttgggactataggcgtgagccactgcactcagctttttcaaatttaatgaaaaccatgaatccagatatctgaaagctcagcaaaccctgagtataagaaacatgaagaaaactacattaaggcacatgataattgtattgctcaaaaccgataataaagaaatgttaaatgaaacaagaaggaaaaaaggcagagtatctacagaggcacaaagttaaggatgacagcagaccttctgttggaaacagtgcagtcaagaagatagcgaaccaacatctttaaagtgcccaaagaaaaacatcacagactttgaattctatagccagagaaaatatccttcaaaaatgaaggtaatgtgaagatttccagtcatacagaaaacttgaaagaaccccgcccccttagacctacccaacaagaaatgtgaagggaagttcttcgggtggaaagacaggccaggtgaagataagaatccacataaaagaatgaagatccggaaatggggatctaagtgaccctggcacaaactaacaatatcttttaagatgaacaaaaaagactactcatctgagactcaggccatggacactcaagtgagtgacctataacacttcacagaacatacaatcagacatcaggaactggtcatgtaggcttttttatagttctaaactaaatactacatagaactttgtgactgccctgtttatttagctttagaacttcatgtgctagttcagtctgtgaagattcattattgatcagatatatacaatctgtaatttggaatattcattcatatttagttgaactttaacaagtcacaagttgttctccatagcaaaccgtaaaagaataaaattaaagttaaagagaggtctgtccgtcagcatattaaggtttgtctgttttgtttgcctcattaatattttgtttcccttttttctgatgtgatcgttttcctccaatttagatacgtctgcaatttattcttcagtctcatttacattcatgacccatgatcctcaaaacctataccttctctaaaaccttatctggaaccatggcctccctccactgtggacgaggcatcattctgtaccatacgccagttcctggttgtttcctctggcatcttcttttgtagctcctttaatccttcagactgcttagatcctatgatctgcccccataacacttactaattttatcttgcatttttttacattggcaagtattcgtttacttactcatgcatatttgccaaaagtctgcatttccattcaacaggaatctcattggtaacagagattacttaaccattaatattgatgatcaactggctggctgtttaaattgccactttcctattgaattttgaagggtgcccatggtgaatcttgtgtgtccctcatgcttggcacacagtggatacttactcactcttgttgatgtttgccagccaccttggcccagaatttctgcttgggaaatagtatcacggatgcatttgtcagatgaaaagcctgcttctggctttataatggaccctttatcctcattgtctttaggggactcctggtcctagagtagttaaatagtaagaattgaatgatttttttaagttgcagtgattacagcaaaaaaaaaaaaattgccaagtaatgttttatttaataagaaagaaacattttctgaatacctaaaaaagaagctgccaatcagcttttaaagtgattaaaaataagaaaaaatgccctatatgtacacatatttttatcactttcagcactctccatgtatttaattccaagttttaggtccaagttttcatttgataccatattccttctgcctgaagaatttctttaacctcttggagtgcaggtctgctggctgtaagtcctctcagcttttgtctgcagtcttttgacttcattttcccaaggtattttcactggctatagaattctggatgggctcaagtttgtttcccttaaagctgtcactcattatcttccacttgcatgccttctgacatacattttatctttgatgtattatatgtaatttttttcatggcatcctttaatgttttccctttatcttttaaacagctacaatacatttagaagcgtgtgtgtgtgtttcttttttggtatttactctgctttgggtttcactgagcttagtgaatctatggtttgctatctttcattattattgcaaaattatctactattttttttaaaacactttgtccttttggctgggcgcggtggctcacgcctgtaatcccagcactttgggaggccgaggcgggcggatcacgaggccaggagatcgagaccatactggctaacatggtgaaactccgtctctaccaaaaatacaaaaaaagaaattagccaggcgtggtggcgggcgcctgtagtcccagctactcgggaggctgaggcaggaggatggcgtgaatccgggaggcggagcttgcagtgagccgacatcgcgccactgcactccagcctgggcgacagagtgagactccgtctcaaaaaaaaaaaaaaaaaaaaaaaaaaaaaaaaaaaaaaacactttgtccttttatctgtctcttctgtttttgagactccaattatacatattttagattatttggtgttgtgccacagctctttaattcttcagtttttctcacttgttttttctctttgtattttagttcaggtaacttctatttacctattttcaaatgcacagatttttttttttcttcacctgtgtccatctgagctgtgtattgttgagctcatcaaacattcttcatctttaatagcatgttttccctttctcacattcctgtctgacttcatttttctgctgagactctccatctgtgtattctgttaccaccttcaccagttgccttccccttttaatcacagttctgtgaaaggccctcctgacagcttcagcacaagtgctgtctgacacttggcctcttgattgcctgccctcttggcagtgagtgattattccttgctttttaatgggtctcataagtttatttggatgttgtacatcatgttaagaatagcagagattgtcacaatgagatatcaacctcaccccaattaaaatggccattatcaaaaagaaaacaaatgctggggagggtatggagaaaggggaaccctagcacactgctggtggaaatgtaaattggcacagctactatggagaacagtgtggaggtccctcaaaaaactaaaatcagaactaccatatgatcttgcaatcccactatttggtatatatccaaaaggaaatcagtatattgaaggcctgttcattcccctgtgtttaagcactattcataatggccaagatgtggaatcaaccgtgtccatcagcaggtgaatggataaagaaaatgtggtccatacagtggaatattactcaaccagaaaattaatgaaatcctgttattttcagcaacgtgaatggaactggagttcattaatgttaagtgaaataagccagtcatagacaaatattacatgttctcaatcatacgtgggagctaaaaaggttgatttcatagaggtggtaagtagaataacataccagaggttagaaaggagggagggaggttggatgaagatggatggatgaagagaggttgattaaggggcacaaaaatacaattactaatagaaggaataagttctagtatttgatagtacagtagggaaattatagttagtaatttattgtgtatttcaaagtagctagtctttaagagaagaattgtaatattcccaacacaaagatacagcctgggcaacatggtgaaaccacatctctacaaaaaaatacaaaaattagctgggcatggtggtgcacatctgtggtcccagctgctggggaggctgaggtgggaggattgcttgagcccaggaggcggaggttgcagtgagccaagatcatgccactgcactctagcccaagcgacagaacaaggccctgcctcttcttccccacccaaagaaaaacaaaagataaatatttgaggtgatggctatcccagttactctgatttgttcattttacatcgtatacatgcataagatatcacatgtaccccccaaaatatgtacaactattatacatcagttttaaaaagaacaacagacattgaaataaagacatactcctgaaaatgggcatacctcctcttaggctgttgataggcaggaggtgttcagtctagtacgagtcgatttgggttagggttttgttcagtgtttgggcctgtgccttcaatgcctcacaagtttcaaattccttcagtgatgggctgctgttcatttgcttcgagttggggtttaggtgcagaaggaagggtttttctctgagttcctacctcccctgtagctttcagctcttaccacgtcattgcacctctgtgggagtcactgtctatgttcttgttcctcccacagaggtcatctgctgttgcgtgttattcacattagaggacagttggaaagtgaggggggcgtgcctgttgtccttaggtaggttctgtgttgctagaccttaagggtgcagcttcctcagggctcttgcacctcctcccacagaggtagctgactgccctgtggtcctcctgtaggatcctatgcccacaaggagagaggaaggtgtcatcttctcctcttcctcagcatcagaggatcttagcctggtcagagcacagggagcatttcctctacatccccaagaggcagagggactttgctgcttctcctccctccaaagtaatggatctttgcctgtgctctggggcagggggaagagggtgtgcaagaaagaaaacaacagtcatgttatacagcgagggccttgtgtagatagagtttatgtagtcataataatgcaagcactgaatgttgagctaaacaaataatataactgtaaggaggatgtgaggatggaagtatttctgttttgggaagccgcagggtgttaaatgatcagttaaattgtcatattccccagtgtaaggtcaatagttaaagcctaagactgaaaaacttaaaatgtcaatgtaaggatgctatttagaaataatgagggccagctgtggtggctcacacctgtaatcccagcaatttgggaggctgaggtgggtggatcacttgaggccagaagttcgagaccagcgtggccaactagcggaaccttaactctactaaaaatacaaaaattagcctggtatggtggtgtgtgcctgcagtcccagctacttggggttcccaagaattgatcaaaccaggaaggcgggggttgcagtgagctgagatcacaccactgtactctagcctgggcgacaagagtgagaccctatctcaaaaaaaaaaaagaaaaaaaagaaaaaagaattaggtaaatattaaataagcttcaaaaagtcacaattctttattctaagaagtggaaactggataggaggaggagaggagacaaagtatggctttttcattaccaagccatggagaactgtatgacattcaaaggtaggcgaataaagatgcttgataaaattaaatattaagttctataaatataaaatttgatacatttaaaactgaattctaaaagtttataacacaagggtagggataaaggtgtagggaaaataggcattctcatatgttggtggagggattccaactggttcaccctttaaggaggtcagtagggcactccatcaaagttccaaattcagtaattcctactacagatatggtagaaaattgtatttcacacttgaatgcaataagactagaaaccatccaaatattaccagtaggtggccgggcgcagtggcacacatctgtaatcccagcactttgggaggctgaagcaggtggatcatttgaggttaggagttcaagaccagcctggccaacatggtgaaaccccatctctactaaaaaaaaatacaaaaattagccaggtgtggtggtgggtgcctgtaatcccagctactcgggaggctgaggcagggaggattgcttaaacccgggaggcaaagcttgcagtgagctgagattgcgccattgcactccagcctggaggacagagtaagactccatctcaaaataaataaagaaaaataaaaataaagattaccaataggtgaatggttagcagctatacagtggaatactatctagccattaaagaaaaaggtgacactttgtgtacttacgtggaatgataccccaggtaagaagcaagatgcagaacggcatcagtgtctctccagattaccagagaaaccagaagtagttttgtttctaaggaaacagggaaataattctcttctaaggaagtgaacttgatagcttagggatagagctgggaggaggatttttttttgccatatacccttttgtgtcttttggattttaaactatttgagtcaattacccatataaagttttaaaaataaaattataatggttaagtacattgggctatttatatggaaaatactttaatttgtttcttagtttccattatatattatacattctgaatggaccatatgactaaatgagagaatcaatatgttaaaaccaggccaggcacagtgggtcacacctgtaatctcagcagtttgggaggccaaagcaggaggattgctttgaacccaggctggtctcatctcgaactcctgtggtcaaatcaacttcctatcccaggagtttgagaccagcctaggcaacatggtgaaacctcatctctatgaaaaatacaaaaattagccaggcgtagtggaacataccagtagtcccagccacttgggaggctgaggtgggaggatcacttaagcccaggaggttgaagcttcagtgagctgagatcgtgccactacactctagcctgggtgacagagtgagaccctgtctcaaaaaaaaaaaaaaaaaaaaaattaaaccttgagaacatatttcttgacattaggattggaaggttgtcttaagagacaaaagcatgtcaaaaagagtaaagatgaagtaatttgtctacactaaaatttaaaaactgacataaaaatgccataaagagaatgctgtgataatcatggactgagaagattgttgaaacacaattgtcaacatttggtatacagattatataatgaacgcctacaaatcaatgaggagaagagttcagggaacacttcaattgaataatgtgcaataaacacaaatagattgatcaggcatagtgtctcacgcctgtaatcccagcactttgggaggccaacatggcagatcgcttgagctcaggagttcgagaccatcctgggcaacatagcaaaaccccatctctactaaaaatacaaaaaaagattagctgggcatggtggcacgtacctgtagtcccagctactcaggaggctgaggtgggaggatcgcttgagcctgggtggcagaggttgcagtgaactgagatcgtaccactgcattccagcctgggcaacagagctagattctatctcaaaaaataagtatttgttaaaaatatgagtaggcagttcacagaaaaaaaaaagctgaactgtggaaaaaaattcaattttgctagtaaccagaggaaagcatattaaaagaaggcattgtttcatatctatcaagttggcaaaagtctgaaaatatgacttcgaggtttgggttggaatgtaaggaaatgtatattgtgattatttgaagtcgtatttttttatagctaggatgacacttcacatctgattttgatagtgtctttttacatgccaatacactatagacatctttctgttttaacatgatacatagaactctgaactccatttctagatgtatttaacaggatatattatccaatgataagactaatttggataggattctttctgagggaaggataatggtatagagaacctcaaggtttttcttagggttttatagtttttcatttttaatgtagattgttttctgcttttttaaaagacattattgcaagagcatctcaagcagacgtcgttacaatcgtgatttggaacaggatgaagcatttattccagttggagaatcactaaaagaccttattgaccagtcacaaagttctggtagtgggtctggactacctttattggtaagttaaacgttcctatagacatgaatggtgtgttgatttagaatgtgtcctcatgatggtggacagtataattattgcagatcagggaacaataatggacacatttttttctccttatttagaaagaggtatgcagtattgcaaggtgaaattagttaaaaataagaaatatgaaccaagaaaaatagaatagtcaagtaagatagagctataaaccaggttataggaaccaagtcctacagagaaaggcaggggaagttagatcacgaagtcctatatgaaaggcaagagttagctcacaagttttgctctaagcattttaccagccaacttaaagaggaatcaggtataagattccttgcatctgtaagtttaaactgattgattgagggaactgtaactatttcagattctgaaataaaaaagaagtttcaacagatattcttagagaggatgcttctctcaatatactactaccaaaacacatagttcaataaaaaataattttaaagggaattacaaataaattccaacaaatttggatggattcttggtatcagggaaaaaaaaataatcccagcaggttcatttatatatggaaatactcagttttgggttgaaggaactcttatttgagaggacctgtattatgaacactagatatccagataggtttaagtttttaattgtattagttgaaagaaactgatctcttcttattttattttattttactttattttattttaatcgtatcgagatagtcttgctctgtcacccaggctggagtgcagtggcccagtcttcggctcactgcaacccctgcttcccaagttcaagcaattcccgtctcagcctccgaagtagctggaattaccagatgcaccaccacaccaggctaatttttttttttttttttttttgagggatgaggtttctccatgttggccaggctggtctcaaactcctggcctcaactgatccttccaccttggctcctaaagtgctgggattacaggtgtgaaccaccgcacccaccctgatctctaattttgaaattcatcttattaaataactctaattgaattggaaaggtaaaagtaaaactgccttcataggcagacaacatgattgtttacgtagaaaatcccaagaatggtacaataaaactactgcagccagtaaatgactttatcaggttgcagaatacagagtcattgtacaaataccattgaatttataggctctagcaacaaacaattaggtaattataaaaacagtatttaaaatagcatcaaaaaccatgaaatatttagaataagcctaacaatttatgcaagacctgcacactgaaaattataaaacattgctgaaagaaattaataaagccctaaataagtggagatgtttataaatctgaggactcagtattaagatttcagttttcctcaaattggtgtgtaatttcattcgaatccaaatgaaaatcagagcaaacttttatagcaattgatgtatattctaacatttatatggaaatgcaaaggactagaagagccaaaacaattttgaagtagaagaacaaagaggaatcactacctgatttctggacttaccgtaaaactcaataatgatctcaatttggtactggcataaggatagatgtattgatgaatggaacagattatggagtttagaaaggaacatgcacttaatatggttaattgattaaaaaaaaaaaaacaaaaagatgcccaagtaattcaattggaaaaaggcagtccatttaacagatggtgcaggaaatatcaggaatccatttaccaagaagttaatctcagtccttacctcctcactctataccaaattaacttgaaatgtagcatagacctaaatgtaaaagttgaagtataaaacctctaaaagaaaatgtctgaaaaaattattctgaccttgggcagacttcttcagtacataaaaaacacaaatcatttttttaatgataaatcaggctttatcaaaatttaaaacttctgctatttagaagacaagaaaatgagaagacaagtcacagattggcaaaacagatctgatacagggtttttgtgcaaaatatataaagaccttttgcaactcaataataagataacccaatttttttaaaaaatggacaaaagatttgaacagacacttccccaaagaagatataagaatggcaaacaagcacatgaaaagatgctcagcatcagcagggatatacaaattaaacacagtaagatactactgcacatccactagtatagctaagactgataatattaagtggtgccaaagatgtagatcaactagaaatctcatacattgctggttggaatgcaaaatggtatggctattttgaaaaatagtttgacaattgcctggaaagttaagggcatactttccgtacaatgaagcaatccttctgctaattatttacccaagagatatgaaaacttgtccacaccagaggcctgaatgtgaatgtttatagcagttttatttataatagacataaactggaaacaaccccaaagctcatgaattgctaaatgaataaacaaatgctggtacattcatacagtggaatattactcatcagtaaaaaggaacaacttctaacacatgtagcagcaacagtgggtgaatttcaaaagtactttatgctacatgaaagaagccagacacaaaaggctacacaaaagtgattctcctgcctcagcctcccaagtagctgggattaaggcatgcaccaccatgcccagctaatttttgtatttttttttaagtagagacagggtttcaccatgttggccaggctggtcttgaactcctgacctcaggtgatccacccgcctcggcctcccaaagtgttgggattacaggcgtgagccaccacgcctggccaaaaagtgagaatttttttacgttattaaaatattctgtatcttaattgtggtattggtgattacatgatatagatttgtccaaggcttgttgaacttttctcaaaaagggtacattttatataaattatacctcaataatcttgacttaaaaacttacaggctgaggcaggcagatcacttgaggtcaggtgttcgagaccagtctggccaacatggtgaaaccctgtctctactaaaaatacaaaaattagctggacgtggtggcagatgcctgtaatcccagctgctcgggaggctgaggcaggaaattgttttaactggggaggcagaagttgcagtgagctgagattggccgccgcactccagcctgagcaacggagcgagactctgtctcaaaaaaacagaacaaaatttacaaaaggattctataataaatgatacataaagtcactttagctttgcactaaatctagtccattttagaagcatttccaacttggagcataatgttctttttaatttagaatgatcactaatgcttctgaaaatgaaagataacaatccatgtacatcttttatttaacaaatattaaagtacttctgatattgtcccaaataaatacttatattctgtgagcaggggatggaattcaagcaaatatatatgtaaataagaataaagttatgattgtgttaagcgcagcaactgagaggttttgtgtgctatgaaggtgtttaagtgagaaaatagcactctaagtaaagggaactggatattcaaaaaaacccagcgacaggaataagcttgagtgaattctaaaagttgagataagtcaaacgaggtttgtgggtgggtggtcaaagcaaataatgggaccaggccagatcaggcagggtcttatagatgggatttttaagatctttaactgttatttggactttgctgcataataaaccaccccaaaacttagtgatgtgaagcaacaaacattatttctcattctgtgagtctgtggggcagttcatttgttggacttgcttagctagagctaggtggtgtagttcacacccttggccgacagttcatgctgccattattttttggtcacagggttcccaaagcagcaggaagggggcaagccccagtccacaaacatttgtcaggtctttgcttgcatcacgttcgctgttgttcttttatccaaagcaagtcatgtggcctaagccctgagtctgtggaccaagactacccacgactgtgtgcactgggagggtaattattatgaccatttttgcaaacagccagccacttgaataacctgtttatgatttcagaatacattgtacattgtttcatactttaaagtacattatggccgggcatggtggctcacgcctgtaatcccagcattatgggaggccgggggtggggtggatcacctgaggtcaggagttcaagaccagcctggtcaacgtggctaaaccccatctctactaaaaatacaaaaaaattagctgggcatggtggcgggtgtctgtaatcccagctacttgggaggctgaggcaggagaatcacttgaatctaaaaggtgaaggttgcagtgagccgagatcgcgccactgcactccatcctgggtgacagagcgagactccatctcaaaaaaaaaaaagtacattataagtttttaactggagttggttgggtacaccatgctttttgatgagatggactacccctttgccagtcttaatgggtttctttcatcaagagctcaaaccttttacttttttctataaaggttcagcgaactattgccaaacagattcagatggtccggcaagttggtaaaggccgatatggagaagtatggatgggcaaatggcgtggcgaaaaagtggcggtgaaagtattctttaccactgaagaagccagctggtttcgagaaacagaaatctaccaaactgtgctaatgcgccatgaaaacatacttggtgggtacacactgattcagtcaatttcatttttgacaaggctagtgaggtacaggtggaagcctccatatgtgctttgaaaatgtgtgagttcaactatatacatttggctaaaggaaacctagtagaatacacggtttgaataaaacatagtccggaatgccaaccaagatctttctttactaaccagctgaagaaacagcagtgagtttcaaatggaaaataatactagtttattggacttactcccatagtaatgaaaacccagtcttttatagataacttaagcagtgatttagggtaacattaacatatgtgccttttccctttcataagctcaacagcccaacatgcagtttcattgtacgttctgtgtttaatgtgtgtttccccccatctccacatttacacaatagcaaagtaatttaggtgtgagctggtcagtcaggtacataagccgatctggctatcctgagttttcttttcccttcacctcttgttttcctccctttaatttggagagcccatagcatgttgccaagcaggcaattgtattagtttcctagggctgctgtatcaattaccacaaactgggtggcttcaacctccaaaacgtattcactcagttttcgaggctagaagtttaaaaccaaggtgttggcagagctgttgtgtctctgaatactctagaggaggagccttccttgcctcctctggctactggttggtggccaggaatttttggtgttccttggcttagtatagacaacactctagtctccatttctgtcatcaggtggccttctccctgggtgcctgggtccacatttccaccttacaacatcaccagccattgaattcgggcccacgctaatcctgtatgagtcatcttaacttgattacatctgcaaagaccctctttccaaataaggtcacgtttatagatgacatggattttagacatgaattttgtcggggagcactgttcagctcagtacatagcactcactgacctttttctggagggaagagggtaggagagaaaggaaaagagcaggactgtgggcctggcagtcaacgagccagactgaaaaggcagctgtgatgagtcactgatgggcaaatgggagttggcttaattaggagctaactcttagttgaacattcttaattttataaaagtgtccactttttgctttgaaattgagagccttttctactagagaatcatgtaggttgataatattctccaggttatttgtataatatgtcatctttttcttttctttccttttcttttcttttttttttttttgagacggagtctcattctgtcgctcaggctggagtgcagtggcgccatcttggctcactgcaacctctgccgccaggttcaagtgattctcttgcctcagcctccagagtagccgggaccacaggcacttgccaccatgcccaactaatttttgtatttttagtagagacggggtttcgccctgttggccaggctggtctcgagctcctgacctcaagtgatcctcctgccttggcctcccaaagtgatacaggtgtgagccaccacacccagcatatatgatctttttcttaatcctattcactttcatgattattaagattattataaatttattgtagaagtacagatatatgtgtaaatgtagaaatataatttttagtaacacattcacgacttggtgtcaggcgaattaaagtttcactatctgcacatgatacctaagtttttctcagtatccagaatgagcattacttctccctagcctatctctgatgataactaaccttttaaactcatcaactggacaggtttcatagcggcagacattaaaggtacaggttcctggactcagctctatttgattactgattaccatgaaaatggatctctctatgacttcctgaaatgtgctacactggacaccagagccctgcttaaattggcttattcagctgcctgtggtctgtgccacctgcacacagaaatttatggcacccaaggaaagcccgcaattgctcatcgagacctaaagagcaaaaacatcctcatcaagaaaaatgggagttgctgcattgctgacctgggccttgctgttaaattcaacaggtgagtggttctttgccccactgttttgaaattattttaatttccaaaagatatttccctatttgtattcaagataatggaattctaaaaatgtgcatatgcttgtttttagttacataaatgtatagttgggggggattttgttctttttacaaaaattgtgtcctacttctcctatacataattcttgatatatatatatttttttggtgtttttttttgtttgttttttgttttttgttttttgttttttttaaagacagtgtctcactcagttgcccaggctggaatatagtagtgtgatcttagctcactgcaacctcgacctcatgggctcaagcaatcctcccacctcagcctcctgagtagctgggactacaggcatgcactgccacacctagctaatgtttttattttttgcggagatggggtctcactgtgttgcctaggctggtctcaaactcctaggctcagctgatcctcccaaagtgctgggattacaggtgtgtgccatatagtcttagccatccttccatttcagctgatgtaaatctacttcattctttttaacagatgcagagttttccatatgtggaggtactgtagtttattcttaagacccaactgatgaacattaaaggtgtcttcagttgattatgaaaaggttttttaatgaacattgttgtattttaaccatatattatatatttgatccttgtgcacttgtacaagcatttcttcatgatggattcctagagaagggcctgctgaggcagtgagtttatacatattaaactatggtatgttgcatattatttctttcagcagtgtgcctcagtttacacacccgtaagcagtagagataaggatgtcatttttctgtcaccacttgatagtgtcagtattttaaaacaaatgcaagtgttagaaattacaaatttttaggaaacctttgaaaccattttaatcttgtaattctagaatggagtggctgctttacatttcagaattcattttaggctgtaatataaaagtaccagtctttaaaacaactgtaagagacatttaaatctgttacagtgttctgagtcagtgtagtatttgttggctcagatatttatcagatgctataggaaaatacaacgcattatattgatcactgctttagagtaattattactaattgtcagtatgatcatgtaaacattgctaacaacagaactctgttgatgggacccataaagaagaaaatgtaatcctatgtcacaaagccttagtgtatcatatgagagtggtaaaagcaagcgattcctcttgtattttcatattcaccacttctcagacataattatctactactttatcttttttttttccttttcttttctttttttttttttttttgagagagattctcactctgttgcccaggctggagtgcagtggcatggtctcggctcactgcagtctccgcctcccaggttcaagtaattttcgtgcttcagcctcccaagtagctggaattatagtcatgtgccaccaaccctggttaacttttgtattttatagagacagtgttttaccatgttggccaggctgatcttgaacacctgacctcaggtgatgcgcccgccttggcctcccaaagtgctgagattacaggcatgagcaaccgtgcctggcttaactttatcttatattcagtgttgtcctctttcttagacaccagacttatttagtgacaaaacctgacctgaacggatgtgaggtgtgtattgcccttatccagttgaggaggactatcggacttagtgttttgctgtagacacagtactgagtactgagttggattaagagtgctgccccaaccctgctgaggatgtcatgtagtatgtagcatgtatttaaagaaaaatctgaaaaatgctaaattccacaatgcatctggccccaaggagaaaaagaagcttttataaaataggacaaaaatacaagataaactattttatttttggccctcaacttggaccttggctttcttttgtttcagtgacacaaatgaagttgatgtgcccttgaataccagggtgggcaccaaacgctacatggctcccgaagtgctggacgaaagcctgaacaaaaaccacttccagccctacatcatggctgacatctacagcttcggcctaatcatttgggagatggctcgtcgttgtatcacaggaggtgggagtttgagtagtttctgattatgttgatttactcatcattttaaaaataacagctccagttatataactttttagtttttaatttttgtgggcacatagtaggtgtatatattattggataaggagttattttgatacaggcatgccatgtgtaataatcacatcttggagaattggatatctgtcccttcagacatttatcctttgtttcaccaaccagttatactccttgagttatttttaagtgtacaattaaattattactaactgtagtcctccccgttgtgctataaaataccaaatacttattcattcttctattttgtctctacttattaaacatccccccccatctgctgctacccttcccaacctctggtaaccatccttctgttctccatgagttcagttgttttgatttttagatctcacaagtaagtgagaacatgtgaagtttgtctttctgtgcctggcttattttacttaacgttatgacatccagttcctccatgttatttcagaaggcagaatctcattcttttttctggctgaatgatactccattgtgtgtaggtgccacattttcttgatgtgttcatctgttgatggtcacttaggttgcttccacatcttggctattgtgaacagtgctgcagcaaacatgagggtgcaggtatctcttcggttagctgatttcctttcttttgggtatacacctaggagtgcaattgctggcagttacgtaatttagatgtcacatacgtcagagtccccaagaccacccccaggttgtgcgatttcacttgaaggaccacaggactcggcatgtggttgtcccaatggctaacatttatcccagtgaaaggatacaaatcaaaatcagccaagtttagaaaaccaggcgaggcttcccagaatcctgtcccagcggagtcagggcgtgtgcttcattcctcttactagttgtgacaacacatacaaagtgttctcattcgggaaagctccttagagacttggcacccagagattttactggaggctggtcacataggcatcctctgcctggcatgtaccagaattccagcaggaaagcagacgtgcagtacacaccacattgtttgcacaagcagcccaggagtggtgagttaccctcaccgtttccggtaagttttatatccatgtagggaactgtttaccatttgtgtacccgggcactggccaaggccaaaccttgcaagccgcctttcctaagggaaggtctcaggcctgctgtgtgaacccttatctgcacctcataagtctttctactgcagagcaaaatgaaacaaaataataaaaactattcattagtaggaacaaccatataagtaaataattatactttagggtaaatggctgatttcgccttgcttattttttttaaggaagattgatatgccctttgtcgatggactctatcacagttgtgatgacatccctggtggaggtagaggaaatagttggacataaataagagaaaaacatacatctactattaagagtgaatcatagtgtctatattttttcttgtgtaagaatccgttttagttccatagtttagcaaaagatgcttactagattggtatatcttgtccagcaaccatttttgtgcccatgttttctcattcccttatagggatcgtggaagaataccaattgccatattacaacatggtaccgagtgatccgtcatacgaagatatgcgtgaggttgtgtgtgtcaaacgtttgcggccaattgtgtctaatcggtggaacagtgatgaagtgagtggaactcagtcccctgaagaagtgattcgtaaatgccaccaaatatattctctgctcactgaacatctctttacttttcagtgtctacgagcagttttgaagctaatgtcagaatgctgggcccacaatccagcctccagactcacagcattgagaattaagaagacgcttgccaagatggttgaatcccaagatgtaaaaatctgatggttaaaccatcggaggagaaactctagactgcaagaactgtttttacccatggcatgggtggaattagagtggaataaggatgttaacttggttctcagactctttcttcactacgtgttcacaggctgctaatattaaacctttcagtactcttattaggatacaagctgggaacttctaaacacttcattctttatatatggacagctttattttaaatgtggtttttgatgcctttttttaagtgggtttttatgaactgcatcaagacttcaatcctgattagtgtctccagtcaagctctgggtactgaattgcctgttcataaaacggtgctttctgtgaaagccttaagaagataaatgagcgcagcagagatggagaaatagactttgccttttacctgagactttcagttcgtttgtattctacctttgtaaaacagcctatagatgatgatgtgtttgggatactgcttattttatgatagtttgtcctgtgtccttagtgatgtgtgtgtgtctccatgcacatgcacgccgggattcctctgctgccatttgaattagaagaaaataatttatatgcatgcacaggaagatattggtggccggtggttttgtgctttaaaaatgcaatatctgaccaagattcgccaatctcatacaagccatttactttgcaagtgagatagcttccccaccagctttattttttaacatgaaagctgatgccaaggccaaaagaagtttaaagcatctgtaaatttggactgttttccttcaaccaccattttttttgtggttattatttttgtcacggaaagcatcctctccaaagttggagcttctattgccatgaaccatgcttacaaagaaagcacttcttattgaagtgaattcctgcatttgatagcaatgtaagtgcctataaccatgttctatattctttattctcagtaacttttaaaagggaagttatttatattttgtgtataatgtgctttatttgcaaatcacccactcctttacaaccatactttatatatgtacatacattcatactgtagaaaccagctcatgtgtacctcatatcccatccttaagagaagaaatgttataaagtagaactaaatataaattttcagaattaatgcattcaaagtaatatatcaaatccaggactttgttaacttcaggtaaaaacttcattagggtaatatcatctcaattttttcaaatgaaaggattctctaattagaaatttatatgtcagagctgttataaatttatcaactgtcaaatatgttctggacagctaaatcatttgagatttttggttttttgatttctattccctaacttgtgaagacaatgaaaaatcaggcagaaatatttagtatctagtcagtatctgtagctacactgtataactgttcttcaataaaatggttcatattttatagatgccttgttatctcaagaaatctgatttacataaacttatacttctttaatgctttttaaatatttattctgagcaaacaattcatgagtacatcaagtgagatagttttatttgattataacataaaataaatgtgattatatcacatcatcatcaaaaaggtttaaattaaatgggaggaaatcagcatatgtccacccattaccaaaatttgactatcatttaaggttaaaacttacaaatttgtctgcacatcaaatttcacaaatttgaaaattgccttaaccattttgattaataagtttcatctgccataattaaagtctgaagtgttcatcaagataagtaaatttgcatatggataatacccaataacttgttttttcagaatttttcaccatatgtatactgagaaatacaaatattttaatctgcgttgccgtatgatatgattgcacttagaacacccaatttacttaaatcttggtttacttttgacttgataccataatctttaaaatcatttgtcatctttttttttttttttttgagacggagtctcgctctgtcgcccaggctggactgcggactgcagtggcgcaatctcggctcactgcaagctccgcttcccgggttcacgccattctcctgcctcagcctcccgagtagctgggactacaggcgcccgccaccgcgcccggctaattttttgtatttttagtagagacggggtttcaccttgttagccaggatggtctcaatctcctgacctcatgatccacctgcctcggcctcccaaagttcatttgtcatcttaataaaaatataaagacaggcaaagtttattggaaatgttcaaatggtgtgtggaagcaaaaaattacagccagtatatgagaccactattatggttttttaaaattaacttggtctagtaaaagtgatatcaagagttaatcttagaaacttgctcagtaaaaacattttctagtataacatgttctttaaaaagcaaatgctgccgtctttggaatcttaatctaaaaatgtggccgggcgcggtggctcacgcctgtaatcccaacactttgggaggctgaggcgggtggatcacaaggtcaggagttcaagaccagcctggccaacatggtgaaaccccatctctactaaaaataaaaaactcagccaggcgtggtggcgggtgcctgtaatcccagctactcgggaggctgaagcaggagaattgcttaaaatcagaaggtggaggttgcagtgagctgagatcgtgtcactgcactccagcctgggcaaaagagcgaaactccatctcaaataaacaaacaaataaataacaaaaaacaaaaatgttgcattaaacttagttcttgtctctcctttccactcttattcttaaatctgaagctcatcgactaagtgaaatatttaaagaatatgataggccagcaagaagaagtattatgtagtaccatagttagtaaattcgtaaaaccttggaagccattatttggtcccacttgcaatttagtgtttttgaagtgtgtagcttcattcagatagctctttaaataattaaaatataaaagcaaacaacccaaactacctgactataaacaggaaaagttaaccctcaaagagagttcttgtgaattctctttatgctggcaaatagctctaggattaaaggcacattagggtttccttcagtttgtttattctaagcttttactgtgctttttactgaacaagtttctgatgtataaaacttgcatctgatttctttggaaatattttcacaaaagttattttaatcagtatttttacattgcctttccagtgtccagaagtgtttctaaacttagaaagtgacctatagttttttaaaattatgttttcctagaacgtgccaaattttgatttactctaacaatcagtacttttcttcagatgctttgttctgtttagaacaaaaatgcactatagtttttaaagaatcatgcatctttgggttggcccaggatcaaatttgatattgaataatttattccagggcagctttcataaacatacttcatagatgttgttttgaaatgtttctaaatatctaaaatcatttcaacagcagaaatgatttttattttaacaaaagattatgatagcccttgtagtgtttaaaagtggtcatatttattactgactttgagtcaggtgttaaaatagcagtgccacagctcgtctcttgccttagtgtgctgctgtgagagtcacagtggaaactgcagggaggaggtgtgttcctaagaaccaaaatccagcacagcatcctgtgaagccacgtgtaatgatggtcccataaggaaagtatgtgaatatggctcttgtaaaggattaactattgtaattttagcttatgctctgtattctgttttctatggaattatttaagcccttttagtgacctttgtcctggcccatttaaaaactaaaatgtagtatatattgtataaaatggaaatatcattattgcttcattaggggaaactgtacataggcattgaaagaagggtaaaagcaagcagttttatcaggcagttgtaaaacaccaaaaatatagattcgtctttgacgtgtaacacactaaatgtattttgtacagcatctggtttaaaaggtgccttaagagtttaccattacttgctttgttctatatacagattatgtccaatgtatcattttgaagtaaataaccttattttagtatactttagtgatgtgttttgtgatgctacactcagacggtattgtgcatcagaagtcatctgttgagatttttgtaatgattaagttagtgtatatacatatgttcctgagatgtacacttcaactaccagaaacccagtatggagcacaggtaggtacacgcttgccctgtggagatagagaacttctaaacctatcacggtgcaggggtttttcctttaaaaaacaagacaaaacattgttttctttttcctttttttttttttttttttgagacggagttttgctcttgttgcccaggctggagtgcaatggcacgatctcagctcactgcaacctttgcctcctgggttcaagcaattctcctgcctcagcctcccgaatagctggaactacaggtgtttgccaccatgcctggctaattttttgtatttttaatagagacagggtttcaccatgttggccaggctggtctcgaactcctgacctcaggtggcccacttgccttggcctcccaaagtgctgagcttacaggcatgagccaccatgcctggccaaaacattgttttctgattatggaaatgtactcatggcagaaaatttgggaaacaacagcaaataataaagcaaataaaaatcactcaaaattctattgccagacattatcactatatacatttgagtgtttcttttcaatctttttttttgagagagtcttgctctgtcactcagggtggagtgcagtagcgcgatctcggctcagtgcaacctctgccccctgggttcaagtgattctcctgcctcagcctcccaagtagccgggattacaggtgtgcaccaccacgcccggctaatttttgtattttagtagagatgcggtttcaccatgttggcccaggctggtctcgaactcctgacctcaagtgatctgcctacctcagcctcccaaagtgctgggattacaggagtgagccactgcacccggccttattcttttttatgttgcattttttgtaatattaggatcctagtatgccattaaatagccattgagaactttttttttaatgactgcacaatatttgactaagaagatggagtaatttctgtgctcaatcccctattgaatatttggattattttcattgttttgaaaaatagatattaagcatccttatacataaatctttattttcttatattacatttctgaaaatgagactagtggatatgaacttttaaaagatcctttaagatggaaaaactaaggttcttggaaaacattgccatattgctactcacaaagcttttcattttcattcctgctagcagttcatgagcttagagcgatgggatgcatttacctggccttaagatgctcctgctgcaatgggaagtgaagccttggatagctttcctcctcctgtgcaatactttcttgtcattttcccacctgcactgagtcccaccgccagtcagggctgttttcaggtgtatgtgaattcatcccagcagtgtgccttctgctgccttttcctagggaactgaacatgttaaatcacagacgcgatgtggcactgattattgttcctcaaaagaaatgcgtgtctgaagatagcctcttacagattcctcacgggagtctctgttcagtgtcattgtaagtttctcagaataatcgcaggcgctctgatgcagcctggtaaagaagactcagtgatttctgggaactgcaaatgcttgccagctttccttctgtctgtggaaacactgaataaatgtattcatttctcctttccagcaatctgttagtctcactgctccattccaaggtttctttaatattattaacagagcagacattaagaaacagaattgtctaatccttgttcttccaaaataggtttaatccttgtagatagtttcaagcagacagtaagtcagttactaagttttcacttggagaaacatttgctgatagtagtagcatattgaccatttctgacatgtcatccttatatcaagttaggtgcacgctcctacacagccttggctcagcgcttggagcatacagtcttgactgggtggacataaaccgctgaaagtggccagcagtgagcagaggccacctactatcagcggcactgctgcaggcatggagacttaaatgtgtgagtgctggtataagcagaagtgggagagtcacctcgatgctgggatccagatggcggcttatttcaagtgcagtggcacatacaaaaaatatttttggaagggagcaaggactagggctgaaaggttcattcataatctttttttctttttttttttaggtggagtctcgctctgtcacccaggctggagcgcaatggggtgatcccagctcactgcaacctccacctcccgggttaaagcaattctcctgcctcagccacctgagaagttgggattacaggcgtgcaccaccacactcagctaattttgtatttttagtagagacggggtttaccatgtgggccaggctggtctcgaactcccaacctcaggtgatctgcccaccttggccttccagagtgctgggattataggcgtgagccactgcgcccagcccataatctccttttgacataggaattgttaattcacatattccatcaacctattgctcctctgaatcttagcagcttcttggtctttgttcaaatgaaatctaagtcaattccatatctctcaatgtcgctacatccacctcagtgcttatatcctaattttgtcttttttagagacagtcttgcactgtcacccaggctagtgtgcagtggctgttcacaggcataatcataacgcactgtagcctcaaactcctgatctcaagccatcctcccacctcagcctcctgagtagctgggaccatgccaccatgcctggctcacattctaaacattatgcaggaagctcaaagtgaaaatcaatatggaatgtttatattgaaaatatttttggctgggtgcagtggctaatgcctctaatcccagcactctgggaggctgaggcgggcagaccacctgaggtcaggagcagcctggccaacatatagtgaaaccctgtctctaaggtacaaaaattagctgggtgtggtggtactcgcctgtagtcccagctccttgggaagctgaggcaggagaatcacttgaacccaggaggcggaggttgcagtgagctgagatcgcaccactgcattccaggctgggcaacagagcaagactccgtctctcaaaaaaaaaaaaagaaaaaaaaatatatatatatatatacacacacacacacacacatatatatatatatattcaagcaatgtgaagaaaatattgggcccccttgtttttctttaatggaagagccatttttaaaagccagtttagaatccagatgatgacatctgttgctctactgtatgactgaaatgcaggtcagtgttgaaaaacataaaaaattggaagtctccactgaaagacctacactgctgtgggagggattttaatcaagacatttcaaaagcaatttttattacttgatcctgtcctcatacttggctaggagttcagctggagatagaatctaactctgaagatgatactccatgatcttctagcatcccttgtcaccagtgagaagtctgatgtggatctaataagtgacatgttatacaggttaacttattttcaagaaatagaattttctttttattattgatgttggaagttgaaactggccatatctaaatatattcattctgtttcttagtactaatgggatcttttcttagacctgggaaattttctcccattatttcttttgtttcttcccttttttctttcttttccttttctctttctagaactttctagaacaaatctcaggtcccctagatgtttcttccataattgttactatgcttctcatatgtttcatcctaccttctacttttgtcagcccatctgagtttatttcaacagccaaatgttttattttgaaatgattccaggcttccattaaagtttcatcaatagtataaggactgccatttacccttcacccagattcataaactgctaacattgcacaattgctttgtcattctgtgtgtgtgtgtacaggaatcacagagactcatcttgtaatgtttgtaatgtccatgtatcgtgtatgcacacatttttttctgacctattagaagcaaattacagagctaatacccctttatccctaaatacttcagggatgttctattacttaaccaattatgtacaattatcagaaccaggaaagttcacattgatacaatagcaatgaccaacaataccataatctatagaccttactgaagttttgctaattgttattttggtgtggttgggttttttgtttgtttgagatagggtctcactctgtcacccaggctggagtacagtggcacagtcatagctcacttcaacctcaaactttgggcctcaagcgatcctcccgcctcagcctcccaaagggctatgattacaggcatgagccaccatgctggcctcatttcccctttccttctcaaaaggattctggctttccctactgcattcatccacgtccactacccgctccaagagagctgagtaattgtcaagccaggtttggggagctttcttgatggaggggatggaaggagggtggtgctcaggctacagcagggagagcttttctgtttttgagctaaagacataacagggtgcagaggctgagaaaaggagagttctaagcaacatgtcacgagctatgtagcctcttcacactgcttctgaaataaaatctaacagtaggagtgactttgacattatgttgtggtttctgcagacaacttgggattggcccctgtgggtttgttaagggcatgtttgtcagagtatgggggctccctgcttccagaggcccagcagctgctgtgtacctggggttcagggctgacggcagggctggagttctggcacacagtgaccccaagtgtgtttatttttttccttgtggtgatggttgaactgttttagggttggtttttgttattgttttttttcaacttttattttagattcaggggctacatgtacagatctgttacctaggtatgttgtgtgatgctaaggtttgtggtatgattgatgccatcacccacatactgaacatagtacccaacagttagtttttcaacccttgcctccccaacatgtctcaagggctgggtttgagtttggggctccgcccaaatcactcccatctccccagcagtctcacatgtttggggtcatgatttcctgttgctgtttcatttcagacctgatcccttctatttttcaggaattactaaaatgtcctgatgtacttatggtaccgtctcttgttttccaattggagatttttttttttttttt

SEQ ID NO: 18 - DNA, 74895 bp, Homo sapiens
agaaagcgacacaggatgttgtctggagaaaggcggggaggtaggatggggcatatttccaggggtccgggcaggttgtgtggcttggaggcctccgagggccgtcgacgtcagccatggtccgggcagagccccgcaaggtgccacagtatcggggccagcgccccccggaaaagcatgctccgctggcggccgccaggtttctccgcggagtctcggaaaggaaaacccgtccccacgggggtcccacgacgcccccgggtcccaggccccgggacgttggcagaggcgcagcagaccttcttccccagcccgcacggctccagcggtccggccgcgtcccagcccgggctgcccgtcccccgtctcccggcggcgtcggaaagttcccggggctggcggcggtcaagagcagagccagggcagccgcagccgccttctagcccgccgctcaccgccgcaggggcaggcctgagcgggggtttccaccaagtcgccgacacccctcgggaattcccccactgggccacacacaaaccccgcttcctccttcaaatttccgctgccggctttaccgatgcgaaagccgcggtggagtttagaccactcctcccggcgccgggctcagcccgccttcgccttccctctccccgcggaaccccttctcgtcgcccgaagaaacccgaaggtcttcggcaagttccgtccccagcgcgggggcggggccgctcgagctgctccgggcctagctcggctgtttccgtgcgcggccgctgcgcactcggcactgggcggcgctggctggctccctggctgcggctcctcagtcggcggcggctgctgctgcctgtggcccgggcggctgggagaagcggagtgttggtgagtgacgcggcggaggtgtagtttgacgcggtgtgttacgtgggggagagaataaaactccagcgagatccgggccgtgaacgaaagcagtgacggaggagcttgtaccaccggtaagaggagcaggaggaggaggcaggagccagagagagccggggggacggaggggggacggggaggcgccggacacccgcgcttggggccttcccctcgcaggaggggccgcggtaaagatggagcctccgcccgagccccacaacatcgccgccgctcgcagcgaacaaagaataatggcggcggactggagccagcggcggccggggcggcagcgactctgcctgcagccagcggcggcgctcatggcggggggcggcgggcggcgggcggcgggcggggtgggagccggcggccgggggtgtgtgcgggcggccggccgcggcgagctggcgcccgcgttcccgccgccgccgccgggccgggcgcggagccgggaacccggagccgccccgggggaggccgcccgctcggcccggcgctgccccccgcgccgctcgctcgtccggcccccgccgcccgcctcgcccccggcccgacccggccgggcctccggggcagccgccgcctaggtgccggtgggggatggaggaggaagaaggcgacagttgagggcagaggaggtgaaggtgcctgctgccttcccggtggcttcggtgcctgccatgcccgcttcgcaaggggaagagctgcaacgtctgacctactcttctctccactctttgtgcaataaagttcgaaacccaaggtttcctctcgtgctgtattttattcgtgccctttcccccccgctcctacaccgttgaggaaatgctgctttctgccctgtgttgcttagttgagagatgagagcttgtgcttttggggggaatttttgactccctcacccctttgctttttttttttttttaaagtcagtcatggaaatgcatgctttttgggagaaagggtgctaagaaaaacatttataataactttttaaactgttgggatcttataaaagggaagctggtgtttgaaaacagtttcggttttaaccctttttaataaggtaatcatcacttgagatctatcattctgaaacacttcgttggaacgagtatcagccgatgtactcttgttttacatcatttcgcggggtgcaaccttgccaaccgcgtttgggtcatctggatctcccctcaccctccgtcccactccccctaccatatttcccacgaatttctgtgtgaactttaatgagagattgatttaatactactactaaaaatagacattaaagtatccattatttgtctcatgcagtaggtaacccccgtcttgagattgacaatttaagccacaagctgtattttttcttcgcctgttgggaaaagaggacagcagaaaagtcattgacacattaaaaattaaaagacagtttttgaaggacgtgcggtatgacctatttaagtttgtaataccatctcaagttataattctaacctcagctggcgtctaacttctgaaggtttagtagaagatacttttgattgctgcctattgaaatcttttacatttatggctcatttcgtgatttaaaagtaaagccccgaacagttattttaggtggtgcaaaagacgaacaagtttgttttaaaaatacttgtctgtcactgtatgattgcattgtgattgatacgtacaaaccttctggttaagaacaaatattgattggcagcagaagcactgtcttatttttctgtattctagtcacttttccaaaacgtgctttgctgtattgcttctctttaaaagaccacattggcaatttgtcatttccaagaaaattaagaagaggcaataaaggcaggttttctataaagattggggaaatgattttatttccgagcactgaaaaaattatagtattgataatggtagcttaccatttttcctttatgttgttccgcaagccactatcagtagagtagaattttttttcttgttaagaatataagtcgggcgcggtggctgaggcctgtaatcccagcacttggggggtcgaggcgggcggatcacttgaggtcaggagtgcaagaccagcctggccaacatgatgaaaccccatctctactaaaaatacaaaaattagccgggtgtggtggcacgcgcctgtaatcccagctactcggggggctggggttgcagtgaattgagatcgtgccatgcacttcagcctgggcgacacagcaagactccgtctcaaagaaaaaaaaaaaaaagaaagaatatatgactcttcatttgtgagatttttaaaaaattgttcactgatggccgagtgcggtggctcacatctgtaatcccagcactttgggaagccgaggcaggcggctcacgaggtcaagagatcgagaccatcctggctaacatggtgaaaccccgtctctactaaaaatacaaaaattagctgggtgtcgtggcgcgtgcttgtaatcccagctactagggtagctgaggcaggagaatctcttgagcccaggaggtggagattgcagtgagccgagatcgcgccactgccctccagcctggtgacagcgagaccccatctcaaaaaaaaaaaagtttactgataagttctttctttagtcttgcccgagagatattttaaattgtattttttatttttatttttatttatttgtttttttgagacggagtttggcccttattgcccaggctggagtgcagtgggctggtctcggctcactcactgcaagctccgcctcccgggttcaagcaattctcctgccccagccccccgagtagctgggattacaggtgtgagccaccgcgcccggcctgttttattatttatacattcataatttgtgattcttagcaattccaggtgaaacttcaaacttgtattcattaatacttgaacattcacctggaacatgttactaaattgtacttctgcactgttccagccatggataaaaattacagctggatctgcttgaatctttttttttttttcatgaacacctacatttagaaagctaataaattacttgacagagtttgcttgaagaatgttaaaagaacacttctttgggaatttaaaacttaagtgttacctgttttgaatgattttttttttgtttacataaagagcctgaagaaacttagacacctgatccataaaaatggcacctttttctactttctgaaactcatattcttgattaggtctcattattagaaattttgggttcttcatagagaagtagctttatttctctctcattctaagacatttggttttgtttgtttggatacagtatggttatggggttatagtaaaaccaagtatgtcttcctcacgtgtttttaaattctactttttataacagaaaattatttttaacctaatgcttacaatatattaccgaaatttataatttcatttattccataaatagcttatcagatatgagttacataaacttgtttacagccagcttgtgacatagttttgcaaatatcttgatatatggtgtaactttgatggcttctttattgaatagagctcaaatctaaatttaagaatgtaatgagatgtcaagatggaaaaatgcaggatttttttttttcttacccatgtgtaaactcatctgtactgcagtatcacttgagacagcagtttatggtaattcaaatatttatttggcactcactgtgacagagaatgtagttgaaagagcatgaggtttggaatcataggcctaggtctgaatccaagcattgccactgctatcctgtacccaccctaaaggaattttgtgtcctgaaggaagtttcttaatctttctcagcctcagtttccttatatgtaaaattagaatactactacttatttcataagattgcgagataaacataaagtaccttagggctacaactaatgatagctagtcccttaagctttattttaacttcctacctgtgggcccttaggcaagttatcttaacttcttaatacctcactttcctttctgatcagtgtagaacaactacctcagaattgtgggggttaactataaagtaatacatactaagtcccaggcattgtgcaagtgtcaagtgctcaagtgttgacaaggcttttttcttttgttttaatttttttttgagacggagtcttgctctgttgcccaggatggtgtgcagtgatgcagtctcagctcacggcaacctctgcttcctggattcaagtgattctcctgcctcagcctccctagtagctggaactacaggcatgcaccaccacgcccggctaatttttgtgtttttagtagagacagggtttcaccatgttggtcaggctggtcttgaatgcctgggattataggcgtgagccaccacgcccagctggtctgttactttttaaattatttattattactatatgtaatacagtgggtcagaagctacaacaaatccaaagatgaattacgctgtcttatctctaccctcaggaactgttggggacacagtgactaaggcaaaatatgtgtcaaaagaaagcagtcaaaggaaaaagggatcacctttggtgaagtgaggagtatattttttatatttctaatttggttttttgaataagtaattcattcacatgatctataattcaaaacataataacagcaaaatgccctacattctcttgccctattacctaagtgttagcaattttttatttgtcctttaagaggtgttttatgcaaacacgagcaaatatgtatgtacagtctccccctttttgtacaaatggtagcatactaggtatacgctctcctatatcatgctttacccccaccacttaatatggcttagcaattttgtatcagcacataaagagcttcttcattttttaacatacaattggaagcattttattatgtaagtagactgtattaaccagttagtgagctgcttttattcttaggtcttatattaccttttaaactaagggaaactgccatcttgcctttatttctttaaatgaaaaactttctatttgaatgaaaaataaatagtttgtgacaggaaattgttatttaaagtccctcatttcctgtttaactccagtttttaaaagttttagtaaaatgatcaaaatgtacatgaggaggcaagcaagccaggttaagagttaactcacaaggtgaatttaactcttttgttgaggttcttacagttctgaacagactacttctttcaattattattttggcccaaaaggtttttatagctttctttcttaatgagaaagaacatttcatatagtccggtgtttttttgggttttttttaacagacagctcatgggatattattacccagtaaggctgattactatactagatttctccctgcattcatttattttttacatacttgttaacttaccttgacgattttctagtatttcttaatgtaattatgtgagttttatattttgtacctaaatttaaaaatagtgagattcacctatatgattgctgagatgataaactttactgcatagatgatttttttacccccgtggggaaacctttggtcaaccagttggaccaagtaatacgtatttcagccaaagcacaaaatgcgtttcactaccttttttttttcctctagcttttcgaaacagcattgagctacaatacttttttatttatttatttatttatttatttttatttatttatttttttgaggcaaggtttggctctatcacccaggctggagtgcagtggcacacacttggctcactgcaacctctgtttcctggctcaagccatcctcccatttcagcttcctgagtgagtgggacaacaggcgcgcaccaccaggcccggctaattttttgtagagacagagtttcgccatgttgcccaggctggtctcaaactcatgagctcaagccatccacctgcctcagcctcccaaagagttgggattacaagcgtgagccaccatgcccgaatgctgtagtacattttaaatatacatgctgtttgtatttatctttaaaatgtacacactatgacttttttgagttgattaaactcagaaagtgattaataatatagcagcaagggcacaaatctctttccagaaaacatcattaagtaaagctgtcatgggccagtcgcggtggctgacgcctgtgtgatcccagcactttgggaggctgaggtaggtggatcacctgaggtcaggagttcgagaccagcctggccaacatggtgaaaccccgtctctactaaaaatacaaaaattagctgggcatgggggcaggcgcctgcaatcccagctactcaggaggctgaggcaggataatcacttggacctggaaggcagaggttgcagtgagctgagattgcaccattgcacgccaggctgggcgacaagagcgaaactctgtcttaagaaaaaaacaaaagctgtcatggtatatttcgttttttgtattcccaagttggtgtttatgcgttgatcatatatacaaagtttttaatgtaagaatattgttttgaggttttactaatatttgatttaaaatattactatgtgctatttggccaggcgtggtggctcacgtctgtaatcccggcactttgggaggtcgaggcgggcggatcacttgaggccaggagtttgagaccagcctggccaagatggtgaaaccccatctctactaaaaatagaagaattatctgggtatagttgtatacgcctgtagtcccagctgcttgggaggctgaggcaggagaattgcttgagccctggaagtggaggttgcagtgagccagtatcaccccactgaactccactctgggtgacagagcaagatgccatctcataaataaaatattactgtgtgctatttgtacctgctaaatgattaaaatgtttacaaagtgctttgttgttgttgttgttgttgagacggagtctttctctgttgccaggctggagtgcagtggtgcgatctcagctcactgcaacctccgcctcctgggttaaagcgattcccctgcctcagcctcccaagtagctgggattacaggcgcctgccaccatgcccagctaaagagacagggtttcaccatgttggccaggatggtctcgatctccttgacctcgtgatccacccacctctgcctcccaaagtggtgggattacaggcgtgagccactgcgcctggcctacaaagtgcttgtctttacatatttggggatgggggtggggtagatcattgaaatctgtaaaggcagaacgttttttatctggaacatatctgtagactaacagagttaaatgatttcccacagtgtcatggaatcatcagtggattgcctcttggggtggaggcaaagatcattaaagcagcaaactgataatgtgaacgtggttgttttttctctgccaattaaatatatgctagtttagtcattatagaagagccagatgctggtcagcttgttgaagttgtaagtagaaggtgtggttttatcacatctgtaaatgtaggtttttgagacaaaacttaaataagaatagacgttagtttttattcacattcagaatgtctgactccccttaatatatacacactcttgtcttatctactgggtttttttgttgttgttttttgttttgccttttctctctctctttttaagctctgccagacaaggccctatgaagataggttttacaggttgagaatcttttatctgaaattcttgggaccagaagtatttccagttttgggttttttcagattttagaatatttgcatatacatacataatgagctatcttggggatgggacccaagtctaaacatgaaatttgtttcatatacacattatacacatagcctgaaggtaattttatacaaaatttttaataattttgtgcatgaaacagttttgactgtgaactgttacatgaggtcaggtgtgggaatttttcatggcatcatgtcagtgctcaaaaagtttgagattttggatgttttattagggatgcttaccctgtattatattttgcccagatgtttcctcatttgtcttctaggctaccagaaagatgttagcttagaaaaacgtattctggcgtttattccaacagatgagaaggcagtttctccagtgatgaataattacctataatttaatacgtgcattatacatctccagtgatgaaaaatcactgtgtattaaaaaattcttgaagctaggtacataatctcaactcctaaaaaagaaaataaacagtagtactccttgatgaacttacagatgctaagttgccttttcttagagttgaaataaggtgataaaggagtttaccgtgagactagctgtgtgaacaaagatgaaaaacaccctttcagttttcttcctcttggatgattctaggatctctaaaaaataatcttaaaaggggcgaggttttgagaggatgaggtctaaggaattgatggtgagttttttctgaaagaagagaagtgacatttgattagataagaaagggttaaaagggaagttattaataaaatagtttaggagtagagtggatctgaaagttgacttataccaatgatgatagaatgtgtcttttcccaaaggttagtgcatcttctctgaaatgaagacgtttctttcatcaattttaagtgaatttctaaggatctggttatctacttgtgagtttttggttgtaactgtatgacagtacagatgtaactaaaaatgtttgtaatttacccaaggttaaataaccattatttttgagggctgttatccctgttggtataagtaagtagttggcagtaggggacacagaaataccttgtttttcaccactgaagtgaaaattacagattattctgaattatttgtactctttttttttttttttgagaggaatctcgctctgtctcccagcctggaatgcagtggtgtgatctcggctcactgcaacctccgcctcctgggttccagcgattctgctgccccagcctcccaagtagctgggattacaagcatgtgccaccatacctggctaattttttttttttttttttgtatttttagtagagacaggatttcaccatgttggccaagctggtctcgaactcctgaccttatgtgatctgcctgcctcagcctccgattacaggcatgaaccaccgcccccagccctatttgtactcttaaaggggagtcattttcttataataagtatcagtagtagctctattgtttgctgtgatcaatggtgacaccttgactttatgtattgccatttatcaatcatttattcagtgaagatttattgaccattgactttattatggttggtgaaataatcgcaagaaaatttattcagttaggtatttataaaaatacctaggtattaaatgaagattgttctagttgatataagcaataaagcctgactatatggctcctaccctcaagaatcttacggtatagtagggatgatgaaatagtgtaagaatgatttatatgtgccagagtacatgacagagtttttactgtcttgaagagctacagagttcagaagagaaggggcttagtgaggaaaagttttgtgggagaagtagaattcaagttgaatactaaagaacttcagtaagtacagataaaatggagtgtattctaggcagtggaatggacaaaaaaatgaaaacatggacatataatgaacttgacatactcataaattggtgaagaaagtattagattatagatctacattttgaggaatgctgagtatgaggcagggagctttgagtttcatgtaagagaaggtaagatataaacaggaatacaatgataaattgggctgaaatgtagatttcctgactcccaattcttctccttagtgtagacagagatatacagtcatgcactgtataagaacgttttggtgaatgacagattgcatatacaacagtggtcctgtgctagtgtaagcaaacctattaagaacttcagataggtccttcaggaggtattccagaagaaggcattgttaccataggagatgacagctccatgcatgtgattgccccttgaagacattccagtgggacacgttgtggaggtggaaggctgtgatgttgacaatcttgaccctgtgtaggcctaggctaacgtgtgaatgtctttttaacaaaaaattttaaaaagtggccgggaatggtggctcacgcctgtaatcctagcacttggggaggctgagtcaggcgggttgcttgagcccaggagtttcaagcagcctgggcaaaatggcgaaatcctgtctctacagagaatacaaaaattaattaactgggcttggtggtgcatgcctgtaatccctgctactcacgaggccaaggcaggagaacccaagaggcagagattgcagtgagctgatactgtgccactgcactccagcctgggtgacatagtgagaccctgtgtcaaaaaaataaagtttaacaaaaaagtttaaaaagtaaaaaaaaaaaaaaaaaaaaaaaaaaaaggaaaaaaccttagattcttttattgctttactttattactaaatttgctttcacttaaaaaccctttagagaaaaaatatttttatacagctgtacaatttatttgtgttttaagctatgtgttattacaaaagagttgacaagttaaaaaaactaaaaagcatatgaagttacagtaagctacggttaatgtattactgatgaaagaaaattttgtttatataaatttagtgtagcctggatgggcacagtggctcacacctgtaatcccagcactttgggaggccaaggcaggtggattacctgaggttagaagttcgagaccagcctggccaacatggtgaaaccctgttcctactaaaagtgcaaaaattagccaggtgtggtggcaggcgcccgtaatcccagctactcaggaggctgaggcaggagaatagcttgaacccacaggtggagcatgcagtgagccgagatcgtgccactgcactccagcctgggtgacaagagcaagactccatctcaaaaaaaaaaaaattagcctaagtatacagtgcctttgaagtctacaatagtgtacagtaatgttgtaggccttcacatttctcacactgattcacccagaccaacttctagtcctgcaagctccgtttgtgataagcaccctgtacagatgtaccattttttatcttttatattttatatcttttatttttactgtaccttttctatgtttggatatgtttcgataacaaatacttaccgttgtgttacatttccccacagtgttcagtacaataccatgctgtatgggtttgtagcctatactatgtagccttggtacatagtaggctataccatctaggttttgttttctaacctaattaactaatgatgcatttctcagaacatattaccatcaagtgacacatgactgtatatgtattacagttaaaaattggacatcatagattcttttttaaacagctttattgaaatataattcacatactctacaatacacccatttggtgtgtacagttcagtggttttcagtatattcacaaagttgtgcatctattaccaccatcagtttaggacattttcattatccctaaaagaaatctacacatctcctctcagccatcacctcttaatctccccatacctgcagccctaggcaaccacctatcacctttgtgtctctataggtttgcttattctgggacattgtgtataagtggaatcatatagcataatgtccattgtgatgagctgcctttagcataatgttttcaaggtttattcatgttgtagtatgtatcagtattcatttttattgccataatagtccattttatggatatagaacattttatttgtgagttcacggacattggactttttgattattatgaaaatgctgccataaacattcatttatgttgacttgccttcatttctctgagtatatactcaggaatggaattttatggtaactgtgtttaaccatttaaggaactgccgggctgttttccaatctgctgcaccaccagcagtgtattagggttcaaattttcccccatcttcactaacacttgttatcatctgttttttggggttttgggtttttgtttttgtttttttgtttatttcaattatagccattctactgagtgcaaagaggtagctcagtttggttttgatttgtatttccctcacgactaatgatatcaagctgcttttcatgtgctgatttggccatttgtatatcttctttgggaaaatttctgttcagatcttttgcacattttaaaattcggttggctttttgttgtaatagttgtttattattctagatacaaatctcttgtcagatacatgatttacaaaaattttctcctgtgggttgtcttcactttcttgatggtgtctcttgaagcacaaaagtttttaatttttatgatttccggttcatctaatttttcttttcttgtttgtgttttggtgttatattgtgtatatcataaattcttgtttattataaacatttaaaaaatatctctgatctctgtgaaggcccaggcaaacaagataccattatttaatgaaaaataactgaagctactaatgtgtatttggagttataatccacctacctcaggccttccctttattctgtgtccatatccttcagtttgtagtgacagatgaaagaagcaaagatgaaaatcgagaaataattttgagtgaaacattttaatttgaagcacagttgtcccttggtatcgatggggaattggttccaggaccccttcaggtaccaaatccacggatgcttgagtcccttatataaagtggtatagtatttgcatgtaatcgacaaatatcctcccatatactttaaatcatctctagattacttataataccttatacagtgcctgcccatcacttgactcttatgggttcagcataggagtcagcatgcagcaaattcaagctttacttctgggacttggggatttttttcccccaaatatctttgatctgcagttggttgaatccacagatgctgaatctttggatacagaggcccagttgtaactatgatccaagaatttgttatttattatgagagaatttattataatgactgcgatggtagtttataacttataaactctaccatatttgggaaattcacagttacaaacatttacctatgaagggggagtgagtagtcattccttcattttttacaaataagctgagtcgtggagaatttaagtgatgtgtgtagaaactcacagtaagtaaggcgtagtcttcatcactcttgtagtactgcattatctctttgtaaagttttcagggtttctgttttattaatggttattaattttatttatttatttatttatttatttttgagatggagtctgtcaccaggctgaagtgcagtggtgctatcttggctcactgcagcctctgcctcctgggttcaagtgattctcctgcctcagcctaccgagtaactgggactacaggtgcatgccaccacacccagctaatttttttgtatttttagtagagacagggtttcaccatgttggtcaggatggtatcgatttcttgaccttgtgatctgcccacctcagcctcccagagtgctggggattacaggcgtgagccacggcgcccagccaaaatttgtttttttgtttgtttgtttgttttttgagacgaggtctcgctgtgttgtgcaggctggagtgcagtggcaccatctcagctcactgcaagctctgcctcctgggttcatgccattctcctgcttcagcctcctgagtagctgggactacaggggcccgccaccacgcctggctaattttttgtatttttagtagagacagagtttcactgtggtctcgatcttctgacctcatgatctgcccgccttggcctcccaaagtgctgggattacaggcgtgagccactgcccggccaaaatttttctttttaagcaatattagtttaggcttgtaagtagctcacttagggtaaatattctagccaagatcatgaaaaaatacattgatttcattatgttcttaatcagatctgcatcagattaccataaataggcagctattctttctttttttccacagttcattgtattcctaccatttccaaatagaagtttatggttttaaattactgatgttaagtacttgtttggaaggaatttatagttaaactagttataataatttatacctgtcaagctctttcatatatagtacatattttatctctcattagtttctgtaagctcttgagagaaaggttcttttttatttccaccttttaagttcaggggtacatgtgcaggatgtgcaggtttgttacataggtaatcgtgtgccatggtggtttgctgcacacatcatcccatcacccaggtattaagcccagcattcaccagctgttcttcctgatgctcttcctcctcccacccccaaccctctgacaggccccagtgtgtgttgtccccccaaccaccgatgtgtccatgtgttctcatcatgtacctcccacttacaaatgagaacatgcggtatttggttttctgttcctgtattagtttgctgaggataaaggcctccagctccatctatgttcatgcaaaggacatgatcttgttctttatggctgcatagtatttcatggtgtgtatgtaccacattttctttagtctgtcattgatgggcatttaggttgattgcatgtcttcgctattgtgaatagtgctgcagttaacatatgcgtgcatgtattgttataatagaatgatttatattcctttgggtatatatccagtaaggggattgctgggtcaaatggtatttctgcctctaggtttttgaggtattgccacactgtcttccacaatggttgaactaacaccaccaacaatgtagaagcattccagagaaaggttcttttatttttgttttgttttgttcgagacagtctcactctgttgcccagactggagtgcagtggcatgatctcggctcactgcaacctctgtctcctgggttcaagtgattctcctgcctcagcctcctgagtagctgggactccagtcatgtgccaccatgcccggctaatttttgtatttttagtagagatgaggtttcactatgttggccagctggtcacgaacttctcacctcaagtgatccacccgccttggcctcccaaagtgctgggattacagacgtgagccactccgcctggcctaattccagagaaaggttcttatatgttttatgctatagtcccatagtatgggactactactatgtagtaattttcagttctgctgaaaatgctgtagtcgttactacgtagtaggcgcagaatatttgtttaatgagtgattctctattaaagggtcataaatttgaaaggtaaaggttaagaacaatttctctttagagttgtacagattaaaggaagtgaactttttttttttttttttgtgagatggagtttcgctctttctgcccaggctagagtgcaatggcgcaatctcggctcactgcaacctctgcctcctaggttcaagcgattctcctgcctcagcctcccgagtagctgggattacaggcgtgcgccaccacgcctggctaattttgtatttttttagtagagacaaggtttctccatgttggccaggctggtcttgaactcccgacctcaggtgatctgcccgccttggcctcccaaagtcttgggattacaggcatgagccaccgcacctggccaaacatatttttctttaactgaggaaattagattcattgtccaaagcttaaaaggaagattttctactttgagtttttattaactctgatactttactatgacagtacttccagcctctgagacatgagaaatagcgtgagattgtagtaatcaaaatgaccttaccagaaatcaccaccaggttggtgaaaaacagtacatctacacagaaggatggacttgatgttgattctttcaagattaaagatgaagatgcccgaacttgaagcaagtcttttatcaaaaccgtacataaagcaaaacacactgtatgatactgtaatggtggacacatatcattacgcatttatctgtagaatgtgcaacaccaagagtgaaccgtaagattaaaaaagaaacaacaacaataggctgggcgcagtggctcatgctggtaatcccaacactttgagaggctgaggtgggcggatcacctgaggtcaggagtttgagaccagcctggccaacgttgtgaaaccccatctctactaaaaataaaaaaattagctggctgtggtggcgggtgcctgtaatcccagctacttgggagactgaggcaagagaaccgcttgaacctgggaagcggaggttgcagtgagctgagatcatgccactcactgcattccagcttgggggacagtgagaccctatatcaaaaaaaaaacaaaaaacaacaaaaacaaatcaaagcctgtacataaagtatgtactgttgcctgcatgccatttgtcagttttaaagattaaccatggtcagtttttaaatgtagtccagtatatccttggtacctttgagttcttgggctttttcctttgctgtttgactagtaagcaaaatgtaataaaagtaattagcatattgcataatagtccacatagttccattcccaaatattacagagaactcctcattttttgtaatattggaggctgttataaccctgaagtcttgaacattccttacaaatctcttgacatcttttgttctccatctgtgaagttagctaacaccagaattcctgtattatgactcctcccataacatgtgctgtctcacctcaagaaaactgaattttcactcttccatgtccaatttgtaaataattcaccaagaataacatttcaaaatttagttcaaaataacagatgttacttcataaacttatttaaaaaacacttggacattcatctcccatttggatgtagtgattttgacgtaatcactttgattttcttaagtaaatgtaagtaggctatacatatttaacttcggggcatagtaacttttgggtacttacagtttcagcattgagctagtttacgaagcagaactaacatttgaagacagcttcattctttagtcaacataaaaattgtttttgtcaaagtaactgtatgtaggaagtatgtgatcctttttttcttaaaaaaatgagctccaaatagccatttagtaacacttcatgtatagaggtttctgtgagatcaattcttccaagtgttcaaagtgtaaaaagctgtgaaacacccattaagtgggtgtttggaatgaaaggggaatggaaagagatgagataaaaatattatctaaaatattgcatagtcgtggctgctgctttgctaagcaacactgtctcttggtggtcacatacatgaagacttgtttcaaattcatgagtatagtcttacctgaaggaaaacaaggcaagtaaactttgcaaatacttaatttcaaacaaacaaacaaaaaactttaagaaagcactacagctttcttgttgaaaggcgctatagagttagtcacatattctgagatggctgtcaaaccatgcaatatgtttctatatatcagatgatttttttttttttaaattgagatggagtctcattcaccgtgtcacccaggaaggagtgcagtggtgcaatctcgactcactacaacccccacctcccgggtacagcattcttgtgcttcagcctcctgagtagctgggattacaggtgcacaccaccacgcccagctaatttttgtatttttagtagagacggggtttcacaatgttggccaggcagatcgcaaactgcctcaagtaatctgcccgcctaggcctcccaaagcgcagggattacaggtgtgagccactgcatctggctggcattatttctaacacacttctgttaaatacttccttcaagaacaatatctttgtcatagaatatgctacattttttaaaaacaaatttatttatcaaggatggcattcaaataccctggtaattacaaaactgcaatgataaaatacaaaatattgaacttaaacagtttctctgagctaaatccaataaataaatcagggaatttgttttcttaaataatattgaaaagattcctggggccaggcccggtggctcacacctgtaatcccagcactttgggaggctgatgcgggtagatcacctaaggtcaggagtttgagaccagcgtggccaacatggtgaaaccctgtctctactaaaaatacaaaaattagccaggtgtggtggtgcacatctgtaatcccagctacttgagaggctgaggcaggagaatcacttgaaccggggaggcagatgttgcagtgagccgagatcactccattgcactccagcctgggcaatgagcaaaactctgtccccgcctgcctcccccgctcccccccaaaaagattcctttttgctatttattgccctgtttttgatgactatggtggtggttgggttattttggtatttactattaatacagtttataaaagtaaacaaattttcaagcttgcttttatttttgtcatataagtaatttaaatcttatcaaattcagatcacagagttaacttcatgtataacttttcttgctttgtaatatctagattggaggctgaaataaggatttgttctctgttaaaagcagaaagaccttggtaggagcacagggaaaactcagcttgataaagataccaatttattttcatttatcacattgtctgctctgacttgttcccttaaaatatttataacctttgttacagtgtgatcagtctaatctaaagtttattcagttgaggttgatctatgttgaggagtgtgtgtacatatatacatacatgtatatgcatatgacatttgaatatgcttttttgcctgtctggtttcaatgaaagtgtgctatatttaacaccaatagactattattagcatcagaaacctggagcattgctaagtttccagtattgattagataacagctcagttctgccaggttggacatatggtaaagataaatgacaagtattttaaggttaaccctcccccgcttaaaaaaaaaaggtgcaggaaaaaaagtaggggaaaacagtagacagtgcaccctagttattgattcttggaaagctaaaatctatcgtgtagcacctgaacattataacactttagaaaattaagacatttgaaggatgtaagaatgtatcagcaaggctttggctggggtgcagtggctcacgcctgtagtcccaacactttaggagcccaaagcaggcagatcacaaggtcaggaaatcgagaccgtcctggctaacacgatgaaacacaaaaaaattagacgagctcacacctgtagtcccaacactttgggagccgaggtgggcagatcacaaggtcaggagatcgagaccatcctggctaacatggtgaaaccccatctctactaaaaatacaaaaaaattggcacacacctgtagtcccagctactcgggaggctgaggcaggagaactgcttgaacccaaggggcgggggttgcagtgagctgagattgtgccaccacactccagcctgggcgaaagagcgagactccatctcaaaaaaaaaaaaaagagagaaaagaatgtattagcaaggctttcaaacagttaccctaaaaactaaatacaggcacaacataactgtgtagacataattatgtatcacatgtaggtacttatagatatatttatgcagagtatttttagttaacatatctgactgtgacaacaaaatagtcatttagtttgaaaatcatgtgcccaaatatgtgttttgctgtggttaccctggagactttggagttctgccatgtgatttccttaaatccctggaatttttgattgctgagaattcaggaggagttgcccacttgttagtgtgcagggaaatgtgtttttctcatttctagttgaggtcattctttttttttttttttttttaaaccatagcatgtgttccattagttatgaatgtattatttctttagagtcaaaattcacaactcatttctttgaatattatctctgatcctagatgggatcaaaattgccctagatttaggagttttaaaagtttactaggttgtggggaagatgggtttatttttcataaacttgaactagaatgttgacgattataaggactgggacacttcctaaaggtcaaaatattttaaggcgaaagtatgtattctttccttttgcctaatgattgaaagaaaaagtggtaatatgcgcttgctttctattatgagctttaatttgtaatttgatgaagatttttgttaacttgctataggtagtcaggtaaggaaacagtggtgccagaatttgtccctgattcagtatagttctgtgcaggtcttgagtagatgaatttaaatgctactttattagtaagagttagatggtcagccttgtactgagaacctccaaccttcttcccagctttatttttctacacgcttcccatcatctgacttacgtgttttacttgtttactagaatgtaagctacatacaagcagagtttttaaaatttttattctgttcattgctttattctgagtggctattatcgtttaccttttttccttgttttctatgcaaagtctcttatcagccactacttgctcatttccatacagggctatagttcaaccctttgctgataccatttttcttatagaaaaagttcttccaaaacttatcaatactgtattcatcattaatgcctctttggaattctctcattctcctgactattgctgaacatagtctcttcttttaaatgctgaggaagcactcatttgacactttgctgagatgtttacctaaactacattttaaactttttaattactactgtttttactgtggaaaggggtgtgaaagtgttacagccctttactattgggaaatctaatcagataaatttcgtgaggctaggatggaaaggaaaaactttacaagttaagcaaagggactgttaattaactgtttaataactctaacgacagttatgaccagagcaacataatagataaaagacaatctccactaagagccttcattgggtaatagtatgacttgtagtttttttaaaaaatgctaataatctcaggttgtattacagtctcatggttatacagatggatgggaatatctctatttgcctaggatcaagaggctaggtgacctcttactcaatgggtcgttctttgttatatgtattagtatatagtaaaaggaaatacttcctttaccataaatgttattttattacgtggccatgtaattatggtctcagctcctaggatcagaggatttaaacttagaagacatttttcggctgggcacagtgactcaacacctgcaatcccagcactttgggaggctgaggtgggcggatcaggaggtcaggagatcgagaccatcctggctgacacagtgaagccccatctctactaaaaatataaaaaattagctggcatggtggcgggtgcctgtagtcccagctactcaggaggctgaggcaagaggattgcttgaacctgggaggcggaggttgcagtgagccgagatcgagccattgcactccagcctgggcaacaagagcgaaactccgtctcaaaaaaaaaaaaaaaaaaaaaaaaattaagaaggctatcctctaccctaaaaaggattggtaggctgcttgaatgaaatgataataaaacaccagttgtttaaatggggctcctatacacactttgttttaaaaagaaatatcgagttgtggagggaagaggatgaaaaacattttgagtatgtctttgtaactaaaatttacttggattcactaatggctttgttcctttattgtaatggagtaatattttctaaaacaaaaagttgtaatggtgttctataccttaaatgtcaaaaaagattaagtagtctcaatgtgttgtaaataaaaatgaaagaaatggtcaatctgtgcattagattgtgtttaatcaaatggtagggtaaaactacgcataccagatgacagcatagctttaaaaatgtggcttggaataaagtctttcaaaaatggttgtgtataccctgtctacaaaggaggtatgatacatttgtatttatctttattctagataaaatgatggtttacagggggagaaaatgaagaaaaaattgtgaatgtcttttttttttttttttggtaagacagtcttgctctgtcacccaggctgcagtgcagtggcgcgatctcggcttactacaacctccgcctcccgggttcaagcaattctcctgcctcagcctcccaaatatcccaagtagctgggattacaggcacctgccaccacgcccagctaattttttgtatttttagtagagaccgggtttcaccgtgttggccaagctgatctcgaactcctgatctcaggtgatccacccgcctcggcctccccaagtgctgggattacaggcatgagccaccgcgcccggctgtgaatgtctgctcttaatactttgactcattactgtcattgagtgtattcatttgtttattttattttattgttattgaaactagttttttgtttttatatgccattttcttcaagatgaaaattacggataacttacaggtagacttttttttttttttttttttttttgagatggagtgtcactctgacaccgaggctggagtgcagtggcaccatgttggctcactgcaacttctgtctcctgggttcaagcaattctcctgcctcagcctcccgagtatctgggattacaggtgcccactgccacacccggctagtttttatgtttttagtagagatgaggtttcaccatgttgaccaggctggtcttgaactcctgacctcaggcgatccacccgctttggcctcctaaagtgctgggattacaggcgtgagccatcgcgccgggcccaggtaaacttttgttgttgttgtttgttacatttgatgtctttcttattttgagtttaaaagaccacagtttgcaaaatataactcagtgaattaatcagttattatttgataatttgattatttgataataaccagagttatttgataatttttaagttttcttataatttagaaatacagggtgaataggcaaaatgtaaacaaaaatggtaatttcatataaaaaagtatctggtgtttaaaaaactttgtatgcatctcaaaatcatgattaaagtatagttttggcttattaaagtgttatatatgtcttctgatattaaaatttgttttaattatccaagtaatcctgaatccattctcatgggaagaaagatacttaagtcaatattaaaatactgaaatatgtgaagagttaaaggtgaaagtcattctgtacagttctacaaaattctgtttctctgttcagagctactgcttatagtttagtgtttaatcttgcacaccttttgcatgcataaacctttacaacaatttgttttacttttttaaaaaaataaatggggctctattttacaatgtgtcaatatattaattttttttcatggttacaattttgtaatggttctcttaatgatggataattgttttcaggggtttttttgctatgatttaaaaaattttacagtgaatactgttgagctacatctctggatattactatcgattatatggtcagtgcacttgtggctttatgaatattttaaataatgtagtcaagtctgttgatctttttccttgtcatctgtgttttgtggattttggtatttccaaactatattcatttctacagagttattttcatttccattttttgaactgtcacttgtaaaacactttctttttatagaaccttatgagtgatagcaagatgtattagtatgtaatacattgtgatggagtgtaatgatcacaaggatcagtgacagttttgatgaccaatttcagagttataaaataaatgaaatatattctggaaaagtcatgggctttttgtgttgtttgtggaatcactaaaggtagtccctcactattaacaaatttgttttgacacataatatgtgaggcactgaattataataggcactagaaacattgcctattttcctgaatcctttagacaggattgcttccccagttaccagagatttctctaaccttgatttacagtagctactgctggtaggaattgctctccactccacttttgctgccatccagtgttacattaccctacaaatatactaagtgcttagcaaagcagagtccaaatgtaagatcaatttttgtcttacccagaattttacaattaaaatatataaataaaagatttctctgtgtgtggatgtatgtgtacagtatagtgttgcatgctatacatggggtgaggtatcagaatgctttttcagtgtttggcacctctaatttggctctgtggccatttattccacctttctaccttgaaattccacaacttgggctcttgaaattacctggtatggtgcaatgcacgtgtattctcagctactccagaggctgaggcgggaggatcacttgagcccaggagtttgaggttgagattgagatgaactgtgagaacatgctactgcactccagtctgggcaacagagcaagacctcatctctaaaaaattttgggcttgaaacgggctgattttgtcctaccactagtaatcacttttagaagtagcttacaattgctgtttcttccttcttatggggggaaatacccttataggaggtattatgaagccaatatctaataaactctgtcatcattagctcacttccactcttctgccatctctctgtacctgattagtatagttttgaaaaattataattttgctaccactgcacctctccttgttagtaggggagatttatgtaagagaagaatcttttatttctagacaaggtaatatcccattgggaagaaacagccaagggagaagaaatgtttttttcttctttgaagggactagaacttttatagctcagcaaatttgaataagtttgatggtaattcagctacattatattttagctagatttctgagttcatttggtaacctaaccaccacatatatacctatttataacttgaaatttgcctttaaagtcacgaaagcacaaagcactgtggtgcttgtaacactcttccatattattataggtaactaaatgaccatggaatctggagccgagaaccagcagagtggagatgcagctgtaacagaagctgaaaaccaacaaatgacagttcaagcccagccacagattgccacattagcccaggtataaaatacatggagagattccagtttgtgtctcttcctagaggaatacgtttccaagagaatttagttgttattacatagatatacatagaatgagcagagatactcttacaatatcaaaattcctatttacttagtattagagtatatttagaaatgatagtattaattcaataacagtaaaatgtattattaaacaataatacagtatttttagtgaaatgatccagaaataattacattttaaacttatgggtaaatggtgctctcagataagggaagaaaaccttggctatgtatgacaactgctttttttatttttttaatatgacacagatttattttttaacagtgggaatgcagataatatgaaagcctaagtttatataactaaactaaaaattaggataagcaaataaattgacatgtaaggaaattttaaggatgatagcagtttttgtttcctgtatattttaaatataatttctgattctttcatttcatctttctctttaacatcctatctttaagaatattttctctcattcttatgtttttgtttgcatgcattctcctcaactattttattaacagctgtttacatagataggaatgagaaaggtggttaacttaaaaaacaaatagcagatacagacctgctaggtaatagtgtgataccgtctctttcagatgaaggttcccaggagaatataatcctagcagaagctctgatatatgtagcttcagtttctccaagagtttaaaagttcctagagaagtcacctagcaagaatgaatcatgggaaatagaggactcaccacacttgggtgtctggctgaggtagtgtgagccagatactggatttccagcaagaatatagtcagaaggagtgagctgttctgtgttttctcctaagaccaccagggtttacctccagccttcaggaataagacaaagccaaatacatctaatgtactcatacgaggcaggctgcaggattgaaggggagagagccaggacttccatcaatatagggtcaacagataagaatctgggctcatctgtatattttgccctttagaaagaggaagacacaatgctaggccgggcgctgtggctcacgcctataatccaaacactttaggaggctgaggcgagcgaatcacttgaggtcaggagttcaagacgagcctggccaacatggtgaaaccccatctctactaaaaatacaaaaattaaccaggcgtggtagcacacacctgtaaatccagcgaccttagaaggctgagggaggagaattgcttaagtccgggaggcagaggttgcagtgaactgagattgcgccactgcattccagccggggtgacagaacaagattccctctcaaaaaaaaaaagaagatgcaatgccagcaggcttctttatgatgatagcccttaacacatcttatctctggagtcacactattttgtccagtctggttgtccccagagtaggctgtattgtgtcatcctgggaattcctttctccctacttccattttctcacagtttgtgtttttgatatggtaaagcatgtttttcagtggttttatgagaaagaaaggttggctgagtaaagatagcatgttataaaaattgaatgtatgggccgggtgtgatggctcacacctataatccccacactttgggaggccgaggcaggcggatcacgaggttaggagattgagaccatcctggctaacacagtgaagcccgtctctactaaaaatacaaaaaaattagctgggtgtggttatgggctcctgtagtcccagctactcgggaggctgaggcaggagaatgtcatgaacccgagaccgcaccactgcactccagcctgggtgacagagcgagactccatctcaaaaagtaaataaatacaaataaaaattgaatgtacatgtgccttaacatctagaagatgtacaacaaaaatattaaaagtgattagctatgggtgataggaatataaagggtttttattttattttttatatctgtattttataaatttataatgagaggagccattatataaaattattagtgtagaaaagggattattcattgagttagctaggtatattttccctagagaagactcaggaaagagaacatagtaattgcttcaaatattacaagagcatttatatggaattgagatgagatactctgaataaggttatggttctcaaacttcagtgtacgggaaagtatgattgggttcctgttagagttgactttacagagtatcctgtgtgactctaatgaagctattccatggaccacattttgagaatcaaataaaactaagcaagatttatagtggccagagagaaagtgattaataagtaaggactttattactatccagagatggaagcttctggttttaccctatatgccaaagacactgtctttatagggatcttccccccaggcttcacagtcacatatttcgctgcctgctaaaataaacatctctacaaattcagatgtcagagtagtttcatcatcttccattacaaccccagtcacccaaaagcctatccttacttcttgcattctctttttcaattaaggacagtctgccaattctctttcagacatgaaacattgggtcatctgcagttcctctctcacctcttttaactattcataaagccctttctggactgcttccaaattttcataaaatcacttccctcgttcccatctctactactactaactgccctctttttggccttcatcatctttccttaactacttcatgggctttcttcgttggtctccccaccaccagttttccccctgaaatatatatctttcacactgccactaaagtgattttttttttttttttttgagatggagttttgttcttattgcccaggctggagtgcaatggcgcgatctcggctcactgcaacctctgccccctgggtttaagcagttctgcttcagcctcccaagtagctgggattacaggcacctgccaccatacctggctaattttttgtatttttagtagagatggggtttcaccatgttggccaggctggtctcgaactctagacctcagatgatccacccgcctcggcctcccaaagtgctgggattacaggcgtgagccacattgcccggcctaaagtgatctatctaaaagcaaacatcaccatggtattcaggagttcaaaagcccttcagtggcttctgcaataccctcaggataaaatgcagtttctctgaggtgacataatacaggctttttgtgactagcacatctagccccacctgcctctgttgttttctctctccctacttcatacatcatacagtaacacacttatgtgcaccattggtgctgagctgctggttatcccactctgccatgtgtgctgtttctctttgcttttgccactactccactctgtgcttgaaattctgtgactcttccctgtaagtaataataacaagtctaacttttttcttttgttttaaattcacattcttccctgatagcctccccttctcttaggttgggtagagtaattctcagtgtgtccatttttcttttagcaaacctcattactaaactgaattgtattgtgtctcttttccccattccttcgcatacatacccccaataatttatttgaggtcagagacccctatctttctcacttttgtagtttcagttctaacattattcctggaacataggtccccaataactgtttcctgatttagcaaataaaattcctatccttgaatgtgttcaagcataggagcaataaataacatctgatagacatgtatgatttaaggacccttttaacctgggtattgactcattaaaactgccttagttctagacttagtaggtcaggtttgcttatgcttgagagcagttagattttagaacgtgacttatttaacatgatattctttagaattttatgtttcttcaaggatagtatatctgttgaccttgggtgaacacttaatctcattgagcagttatttgtgtttttaaaaatggagatccttatcacccagtcttcagtttcttcaaatagcaaaatcagaaattggaaatgaaagcaggtgggaaaatgtaaagtgccatacaaataaagtgatatctcatgttcagagagtctgtattacatatttggtataacatgggaatagtttttaattttttgtcacttgggaagagctgaaaaggataggggtatagtttttggtgttttttatagtgttttttcttaaagaatattaaatttagtcattactttcatatcagtgaaatacatatctagcaaaaaggtcacgtttttgcttctaaaaagttatttcatattgaacatgagtactgccaaagagtgtctgggatgataattcttttctgtgttcaacaccataggtatctatgccagcagctcatgcaacatcatctgctcccaccgtaactctagtacagctgcccaatgggcagacagttcaagtccatggagtcattcaggcggcccagccatcagttattcagtctccacaagtccaaacagttcaggtatgtgtataaaaagttctgcatctattttaataacttttgtttatagccatatctctctcctttcactagttatgaaaataaggacacatctagttcagtttattttattcacagtataggaatatgctgcatctgtatagtcaccttatgtataggaacatatatacagaagaacaaacataaaagaaaatgactaatttcttaagctgcagaggaaaaagaattgattggggaaaataatgaagtacatgagataaagtggaagtgtttgggagaaactgtaggactgaagtacctcagtcgaggaaaattgagatgcaaaaatagtaactaattttctaaatctgcaattggagaaaaatatacccttgatcaaaaattaataaccttacctaagatattatttgaccttagagattacataaagcatttgtaaaatcagctgtgcttagggttttcagttacagtgtgtaactttgaaataatatattcagaggttacatcttaagggtcaggaattatactatgcatgttatctaattctttggagagatctttcctttgggtttgatccacaggtaataaaggcactgtagacctttgaaggtgactactctgtttaactgtagggaaccgagagcagtatagatcattgcaattgagcttattgaaaaaaaagacttgaacgttcattcaagtaggccataaccccagcctcccatttcatattttttgcttcacagtcttcctgtaaggacttaaaaagacttttctccggaacacaggtgagtcctaggtcctagatttggagagaactattattagaaaggaaggtgagaaattattctttatgtctttgtccttttcctctataaacatggaatttcaacacttgaacaaaaacctcagagatcttctgggtctaggccatacttgttacctccccagcccttagtctgttgcttaattctgtttaacatttctcccctcttcctaatggtagtccagcatttacttgaacactttcagagaaaggaagctcaatctcctgaggtaacctgtttacaattaggagtgattgctaaaatattcttctctgtgatgatccaaaatatatcttcctaaaacttttacctagtgatcccgggtaaacacaggttctattctcggaaactagattagcaagtctaattcctgttctattggactgcttcctcttccccatcccccgcacccttcctatttttaagaaaatttccagactaaacaaactatttttctttagccatttattagatggtataactctgtttcctcttcaccatcctggttgttttcttctgggtgagcgctgttatgttttctttacatatagtaaccagaactgattaatatttgtagaggggagaagtgctgtctttgtcctggaagcattctattaatgtcctcagtagaatttgtcagccattttatactattgagtcatcgaacttctattaaccacctctacttcattctgtctttgtgcttttggttcactttgacacttaagtgggagcgtgggggaggagaagtaatgtttttgtgtgaaatcatcagttggatcaatttccataagacactgggaatggcatttgttaacaagtaaaagatagtgttgtgcatgtaaagatctaagaacttgatatttctatgaaatcacaatgactgagcaatagtcctttgccttagtttttattccattgagtgctaccttaccattgtccatactgtgccattactaattccctaaccatatgctcctcttagtaatagtgagaaaacttgatttgctagtgaggagacctagattccagacccagtttggacattaataagtcaaatggccttgggcacatctacctttctctttttcacttatagaagatctttctataaagaacacaaaaattacttaagttacagccacaaaatttgctaagattactgttttttattgtaatatgtgttattgttgattgtattcttgattttaatctttattctggggcaacataatttggacatgaagattttatggccattaagtatagaaatattctcttttttttatttgcttgtattcatctttaaggaacacatttgtccattaaggtccattaaggtgagctgtacttctaatttaagagtgtgtatttataaaagaaaagttggacttattgaaccctggattctacaaatagagatacaaatataatatttttttctttaaaaggcctaaactatagaatatctattttaatagttatcttagccagttaatggtgattagtgttaacaactaggaaatagtttttatcaaaagagatgatcaaacaaggagaggatcttctagatgggagacctcattaatattccagaataaagtttccaaaatatacaaggtacagttctcttgttgtgagaatagattattactttaaattatcattcattcctacaacaaatgtttattggtgacatgctatgtcactgttctgcttgctataaaagacagcaatgagcaaataatacttctctgttctcaagaagatcacattttaatgaaaagagacagactatgaaaaaataaattgtgtcaggttaggagaattaacgagagagatgaataaagccaggggaaagggatggagaatgatgtggagggaagggtgttctactttatgtaatgtgctcagggaacacagcacagaccagaaggcaatgaaggaggctaaggcatgcagatcgaaaggtttggaagtgagggtatacttgggatatcaaggaataacagaaaggtatggctggaatagagtaagtgaggagggaagtgattggagatgcaatttacaacgtaagtttgtctcctttaaaatgtcaaatctacgtattttaaaaccctaggaatagaactttgtaaattgttcaggagtcttccggagtttcagcaggtattgaacttatttcttaaaaatacaaaattgtaaccccttcctattaacatggaataaactgacttagagccagggagatgaaaataataaactagataaatctcattgaaagcttgcataattggtagatgcaaatgaaaatgattatttagtaagcatacctcaaatgcacctagttttgttatctacatgaagttttctttttcaatgccagcagttgttaaatcacatttcagaaaacccaagcttagaatctgacttctaaatgactgttataaagtgttaaatgaggtcagactccgtggctcattcctgtaatcccagcactttgggaggctgaggcgggcggatcacttgagctcaggagttcgagatcagcctggccaacatggcaaaacgccatctctactaaaaatgcaaaaattagccaggcgtggtggtaggcacctatagtcccagctactcgggaggctaaggcacgagaatcacttgaaccctggagacggaggttgcggtgaaccaaaatcatgctgctgtactccagcctgagtgacagagtgagactctgtctcaaaaaataaaagtgttaaatgatttttaatgaagcatattatgtcattctcactatcctgaaaaataatattatttatctttaagaaatatataaatttttaatatttatgcttatcatatctctttaagaactcttgttttataatacgaatacttaaaatttagaaataagaaaaatgtatgcctgtgtaaaatttttcttatttataagagatacatgcagatcaaaagagttggaagatcattgatctagactttcagtaagcttcttgatccaatgagtaaaacactgtatctaaggccaggtgcagtggcctataatcccagcccaggcaggaggattgcttaaagccaggagttcaagaccagcctgggcaacatagcaagaccctgtctctacaaaaaaattaaaaattagctgggagtggtagtgcatgcctgcaatcccagctaactcaggaggttgagtctggaggatcccttgagcccatgagtttgaggctgcagtgggctgtgatcgcaccactgcactccagcctcggtgagtgagtgagatcctgtctcttaaaaaaaaaaaatcttaaaaaaaaaatatatatccaaaccatgagtctcaactctaccgagggatagtacttaagtttccaaaggaccatatataggtttaggaaacatcgaatattaccattgttttgattggttctagttactttatagtttattttaaaatttcaaataatcgaaacggggtcctccacctttccaatataaacaggtagtatgggttttaaataaaccaaagttgagaaatacagacctaaaactttatatctacaagtggtagtttagctttttgaaaatttcttgacttacaagtggccaaaattaaagacctatttaaggaattcagaaagaagttaataagtgataggagatgagaataaaaggaaggggttccatcattggaatgtgatgatgatacgtgatgtttataattgggatataatttttcatatgatgtttttattctgttatttataaaaatagatttttgacatgatttttattgatctcagttatgtgggtccagtatgtttttttttttttaacatcagttttaggttcacagcaaaattgagaggaagctacagagattacctgtatactccctccccaactccatggatagcttcccctgttcttaacatcctcccccagaacggtacatttatgttataatttgatgaccctacattaacacatcataattacccagagtccatagtttacattaaacttcattcttggcttggtatattctgtggcagtatttttattattgattaagtgatagatcagggactccataggaattagcttcatggcttacttctcttcagatggtattcccaaagaggaagtgttgtgtttatttcagtggtctgaattctctttacatttacaaagttgcaagcactaaatagtgataagttaattccttctgtgtgaattgacaaaatcttacaggtcagagaaaggcaaccttttttttttttttcattaagggccatagatccagagttagaaaaaaaaaggacacagattaaaaaacaacattaatttgtttcatttcaaaactatcctgtgggtagtttatatggcatgttttaatgttgttgttttagtgagttccaacttggaaggggggtgttccctaatcactatatgtccttaagagaagcatgtaaggatggggcatatgagagtcaagcagtggacacagaaagagccacagaggagctaagtgaattctgagtggcgtattaatgaagggaaacaacacttgtcacagtactatcaactttgagttcagtcttgttattccttgaatttctgatcctttcctcaggccttttcatagctcctgatcttctgtatgtgagaaagtttgtgcagagactcttgtgtgtgggctagttacagcagctactgattaacgtgaaacttttctgtgtgcttctttggcagtaattacagcattattattctgctgagaatcacagactaaattcagcattactcatctttttatctgtcatttgtgaattcattatatgttgcctattgatttttaggtctttcagattgtacttagactttaaagtgtttggatggggcaaattacttcattataaatatattttactacaagttactaactttacctggtttcattttaaatgagcatgcatatcacaaagccctgtaaaatgaatgcccacttgggagaactgttaggctcagaccacacatagagtacgcttggaatttctcaagtacttctgaatatgttttcttactgccattgccatacgttttgacgtggagctgacctacatagacccttttgtcttggttaagtataattcttactctgaccgcataatgtgcccctagttcaggaaagagcataacgtttctgctgattagagaaacttgggcagtgtaaatttgacaatcaagcatacttaggtaagtgaactcttctagtctagaaaaggtgtgaaaatgccactggttgctgcttctgacaaacctggtttgagactataacagtctggtttgagactggaaccaccaggattttgatgctggtaaggatgtctaaaatggaggttaatgacagtggctccactacttcctagctttgtgactcgggtgagttacttctttgtgccttagttcttccatctatggaatggatataatagtatagtacccatctggcgcctacattactgtgagtattaagtaatgtagtatatgtaaatgcattagcataacacctggcacataggcatctgtaaattctagtttctatcattaatatcccatgtaaattttttattcacttatcttcattacttttcagtctaggtattcttatcagaaaagcatagttctttaccttgaatttttacttaaaagtgattatagaatgctaactttgaaacatgttaggagtttttcctaacttgctaggaacaactgtcagggatgtcatgatggatcgccagtcttactgtacaactgtaaatatattcataagtgtttatacagttaaataataatatttgtatagtcactatatagacttaggaccaaatatttagccatccattttatcctttatatcagaaaccttattttagttggtagttttgttccaacagatgtaagaaaaaactgataagtaatactgatgcattcaggattgattacatggagtcctgaaaaaaaaattaaactgcagctattttaggttctctaacttcatcgtagtttatagggtaagtaaagggaaggggaaagtgattggtgtggttgtctcccataagaactgatttttttctactgaagcatgtataaagtttatatatgactttttatatttgtttaataaaaattttacaggaactaaatttgattatcaatatgaagtttttctttaatttcagatttcaactattgcagaaagtgaagattcacaggagtcagtggatagtgtaactgattcccaaaagcgaagggaaattctttcaaggaggccttcctacaggtatggaatttaatagttagaatcaaagatgtggaggaagtcttaggtagttgcagataaagagatgtcagaagaccagttagttgttcacgtcagttccttatagattacttttcttcatcttgagttatttgtctcaaataaagtggaagcttatcctacagaataagaagagcacttgttactctcaccagtcctaattttttttttttctgtttctgtttctgtagactgtgctggctgtctttctgttaaaagtttggaatacagttgataaggttatagcattttttagttataagccaactctgaggctctgttatttatctacttagtaacacattgcaaaccattttttatgccatggtacttaacagatagctattaatttaataattgtctcagggagatgctttactaacatcccctaattttagcagtagcttactgtaatttttgtgttcagttatagatgttgcctagtccatgccttgcctccaaggtgaaccaaaaccattttttaatgtaaaaattagctccacattaaatatcttcaggaagggcagttccataaatcttgataagtttacttcagcattgaagaaacttcagactcataattatcttccttgttagtgtaaattattttttatatattcctatttttcaaagggatggttttttccccccgcttggctattaaactaacccttttctctgtccttacaattaaattaagaatcctaagtgactagcaataaatagattttgaggtctaagaaattttatattaccagtttatgttatatgtatttatattcataatttattttaagtatagctagtgttagattttaactttgaagtatatctcctgttagtatataacacatttgatcctgaagcaaatccaaccaaatactactagtaaagtaattacacaggtaaatataaaagccaggattattatagttttggtttgtaactcctttttttcctatgtgattggaaagacaaaggcatagaacaataactataaatttatgtgactaagcacatgatatatgaagatgtcatttttgacaatagcataaagggacagagtttataactagtttgttacaaatttaagatatcaaaaattacttgggttagggtttttaggggttttttcccacctttcagtgtgattatgttattcatttgaaatatggtatggttcctttgtttttgggttccattttagagtttctccacccatccttgttgatctttatttttttttctagtaagtgaaacatttaacactgtaccaaaagtcagaattgcacaaaaaaagtatactcagtagtgcctccccattccttctgtcgttttcatttctttcctacccatccccagtaaatagctaaaaccattactctctcgtttatccatcctgatttttttccttgaacaaatgagcagatacatgtctgttttcatatttcccttttttccttacacaaaagatatgctgtatccattatttggatgtaccatagttgattcaaccacttgcctttatatgggcatatagattgtttccagtattttttttcctttttatttgtttttctattttagaccttggatatatggctccagtattttgcagttacaaacagtgccaatgggaataatcttaagcgagtttattttaatattgttggaattggggtgaattcctggaaatgggattgaggcacgaacacccatatttccttaaatatcaacaattccttatatcgggattgtgccagttttatactcccagcagcaatgtatgagagtgtggtgttttttgtttttgtttttgttttttttgtagctttgctaacagattttgttaacacttttttgtttcccaatctgagaagtgagaatttaaaaatcaggttttgatcttttttccctttagttgattgttgactttttactttccgactttgtgtatgtgttctttgagatgcaaaagattttttttaatgtagtcagtcttattattacccttaattgcacccttccttacattgaggttaaagataatacatctttttttttgtttttgtacatatttgggttccttttgacatctagatcaatccctgacccatgaagagtttattcatgtaatttatatattttaaacttctgctggctgggtgcagtggctcacacctgtaatcccagcacttcgggaggccaaggcgggtggatcacatgaggtcaggagttcgagaccatcctggccaacatggtgaaaccccatctactaaaaataccaaaaaaattagccaggcgtggtggcaggcgcccgtagtcccacctactctggaggctgttgcagaattgcttgaacccgggaggcggaggttgcagtgaaccaagatcgcgccactgcactccagcctggcgacagagcaagactccatctcaaaaaaaaaaaaaaaaaaaaaaccttctgtcctaagcactagcagctttctgtgagttttctcatctttaactatatttgtatttagccagtaaattgtacttatatttttaattattctagttttctaattttgtaggaaaattttgaatgacttatcttctgatgcaccaggagtgccaaggattgaagaagagaagtctgaagaggagacttcagcacctgccatcaccactgtaacggtgccaactccaatttaccaaactagcagtggacagtatagtgagtaatagacaatttctgtttctattgtgaggagaaaaaagtgaggagaaaaagctaatagttgcattctcttcagagaaaccaatacaagtgccaagtcttctcagttttgctgccattattatatttcctttactcttcactatgcaaaggtctgtaatggtagtattttcttttcttcagagagttttagttaggattagtcaagtgtataaaccttttagatgtccttttgtttttgtgcagatgcatggaaagtctgaagtttttgaaccactaattgagaccctaggtttgaggcctcatgtgttgagagaacataagttttttagattaaaaaaaatcattccttgaatatatctcggtattcattttaatagtttgtcttgccttctgaaagtagcattttaatgtcttcgtatttaataatgtttcaagtggggataagcatggcttggttgagtcagcacattcaattattccttttcatatgaaagatagtaatatactttttggcccacataaagcaaaaattgctcttacaaaattatttaaaagttttcatttctatgatgtctctgtctggcacttaggtctgtcttcttatctttcaccaaaatctgttataagacacttttgaattttattttgtttgatcaaaagcatttgtgtgaatggtacttttttctctttttcccttttttttttttgcctctcaaagtgctttattcattcagtgatttttttcatttgtatttgtttattaaacctggtgctgcccatttatacccttttccccacccaccttagtttcaaattaaatgtacacattgaaacttctttactgagatagtttcctaatccctgagggaatctgtatcagaaatatgcataaaagtttgaggccaggcacagtggctcatgcctgtattcccagcactttgggaagccaaagtggaaggatcacttgagccatccaggagtttaagaccccatccctatttataaaaataatttaaaaattaagaaatatgcatgaaagtttgacccccatgttattttttagttccagttcaactttgttttgcgtaactctaatttgcattcccatctgtattaaagacaagttctcaagtagcaaactttttaactctgccaaggctgaaacttttgagactaagtagaaggaaggcatttttgactaaggtttttatccactgtgctcaattagcttagtcatcttttttcttcttaagatctttgtggcagatataaagtacaactctttacctacaattctgtacgtgtatgtgtattatcagttgaagcctcataccagatgcttttagttattcaagatatgtgttcgaagacattgatacatgatgtttatttttcttctacttcagcatacctgagggatacaacatactcctgtcagtaacagattcactgttacagagattctcacttgaactaggaagcatgctctttaggaaagaggcctatcagaatctaaaaaggggaaatgaaggttagaaaagtaccagcacccccatagatgtttaatttggtacactcgtctcctccagcagctgaaaattgctagttttaagagattgagccaggcgccgtggctctcgcctgtaatcccagcacgctgggaggccaaggtggtggatcatgaggtcaggagttcaagaccagcctgcccaacatggtgaaaccctgcctccactaaaaatacaaaaattagccgggcatagtggcggacgcctgtaatcccagctactcgggaggctgagacaggagaattgcttgaacccaggaggcggagctggcagtgagctgagatcacaccactgcactccagcctgggtggcagagcaagattccgtctcaaaaaaaaaaaaaaaaaagagagattaatactttgaaatttttaaagctttgttcattatttttatcctgtgtcctctctgtatatgtacacatggctttggctttgatggaactgatttaacattatattcttgattttcattaagagcaatataataaatacatatacagcaacatttatatttcttaacttataaaatgaacatatggttgtcagaattcaccatagatatataaacacacatagttatatattttgtttaatagctgcattgtgtttcactgtgtaaatacagcacttatttaaacattctcctgctgatgaacatttaggacatttctattgtttcaaacagtgctacataaatatcctaagagtggaattatcgaccatcctggctaacacggtgaaaacccgtctctactaaaaatacaaaaaattagccgagcgaggtggcgggcacctgtagtcccagctactcgggaggctgaggcaggagaatggtgtgaacccagagggcggagcctgcagtgagccgagatagcgccactgcattccagcctgggcaacagcgagactccatctcaaaaaaaaaaaaaagagtggaattatcaaattaaagcatatcctccgcaagtacccttccaggtggaggcatgaatttccactccttccttaaattggttattttattaaattcatgctgttactagatttatctgttacttattagttcagtgtcccagatagtaaaatcttattagtgattctgctcttagatagaaaatgtgtatctgtcattttgaacttgaatttttttgtttcagtaaataaaactatgactcatgatgtttccctctttattctggcaactcagattcttagctaactttctgtttaattgtattcttttcttagtctagattttcttctacaattgttttatataactaaggatacatccgttacttgacttctgtctttttatttttgttttaatgaattgtgttttattgaaagctatctcaaatctttttggaataataaagtgtatacataaacattatagagaaaaactgtgttcagtaggattagacttcagtttccaaagtattttcatatacatgacctcatttgatatttacaacaattgtacttagtggctagaacccagatgcttttgtttttagagaagagagaacagaatcaaataacagtttagtgatggctgggcacagtggctcacgtctgtgatcccaacacttggggaggccaaagtgggaggactgcttgaggccaggagttcaagatcagcctgggcaacatagcaaaaccctgtctctacaaaaaaatgtctttagaaaattagtagggcctgatgtcctgtgctagctacttgggaggctgaggcaggaggatcacttgagcccaccagttggaggctacagtgagctgtgatcttgccactgcactccagcctggaagacagaacaagaccctgtctcaaaagaaaaaaattaaaacaaaaaactgttcagtgatggaactcaaactacaacccagtcttgtcatatatggtttactatttctttcttcttcccaccttgaattcactgctctgtagccaagaagaaagtggtatgttaaatacagtaggattcactcattaactctaaatgagaaattgtgatttgtttctgttaaccttctgattctttcaagtaatcatgcaaaattaatcttagaatagttcttactcatttttctccctgcctaagataagtaaaacttctgggattagctaaactagatccagtgtatatgccagcattttaattttcacaagtgtcattttgctaaactaatcacactgtagccattaactcttcttacttcttgatgaggcagtaatcaattttccatgtacagatgtctcaggatgttatttcccatagctggtggataactgatcccaaactaattcccttctaatggacagtaacatgcttaatcagacatgttgactttcctgcattgtttacttttttcttactcagttaaaatcagttttgtagttttatatgtgatattgtgatttttggtccttctctttctgaaaagcttgacccctacagggagaattgtctagagaggatattgccacctatctaaaaatgcttcttccaaataaatcatctaatttttaaattaaatttttctatgtactgtagcataaaggtgatttagtttttcataaagtgaaatatctactagtatgagcaaaagttgactgatttattgtttaacaaatgaatgacaggtgtggctaattagggcataaacaacaaagggttctatatgagaatgcttggatatgtattaaataatttagaaatgacagttaaagttttttttctaaatgatgatcttgagctctgattttaaaattccatgagagactgttgataattaagttccataggatatttcagttgtttcattgagtggattagataccattaaagaatttctacaagagttagggaatacaatgcactgatgaactgctttattagttatatgttaaaacaaccatttattgggtgcctatttcatggctgccactgtgctaagtgtatgaaagtatataagaaaattcctactctccagaaatttatttactagtgggacaagtattaatacattatgcagttaatgctaaaataaaagaaaggatcacagagtggaacctcttcagaaccaaataacttcagaaggaatttaacatttttccacttaaaaaaattgttaacaggcattattattataaattagaatgcagttcatagagtgcatttctattgtagaagttgaatatgggtttcctgaggagcaagttacttgaatatattagacccttcttggtgatgttatttgctgtaacttctcctagattattttacaaattattctacattggatgtaatgttttaaaagtcttatatggtattaaacttgtaacaataaaatccattggcttttagttgccattacccagggaggagcaatacagctggctaacaatggtaccgatggggtacagggcctgcaaacattaaccatgaccaatgcagcagccactcagccgggtactaccattctacagtatgcacagaccactgatggacagcagatcttagtgcccagcaaccaagttgttgttcaaggtaagggaattcagaattcacaggtgtggtaaattcttcaaaatactaaaattttataaactcacagaaaaagtaagtatcatattgcaaaccaccattcaaatgtagttaacatttcttcaatattgatagtatttttcatgaactcttccattattccaattggaccaaaatgtcatggcataaaaacaactattttcagtttttaaaatattgcatctacctttaacatcttttggggtagaagaaacaggataggttagaaggaaagaccaggaaatcaggagttagaaaagatggattctgtatctaactgcatggatctgctatgaggccttgagtaaaagtcagctgctctgagcctcaggaaagtgttttgttttttgttgttgttgtttttgttttttcatctgtaaaataagagttgcactgaatctctggaaacaatcttcagaagttcaggattctgtttctctgcttccccccccccccccaaaagaaatttaaatcttctgagatcatcagtttttattattattattattatttttttctagagacatggtctcactgtgttgcccaggctagtcttgaactccgggcctcaagcaatcctcctttctcaggctcccaaagtgttgggatgcctctgcacttgactcagtttttgtttcaaatgaaaacattatattccacaggatcttataccaatatgcaaatctgctgctctttagagaaaaagtagttgttaaattctcgacaaattatagaagttgctttttttggcttttttttttttttttttagttttttttttctgtttatttcaggaatctttatggatagcagttaaccatttttctttggatttgtttgaatatttcaagaatatagttaatgccaggttagaaatttgctgattgaggaaataataataaatttgtttctgaaaatatttttataaataataatgcattttgcctgtgttaggtaatgacagttgtatcctttcaccatggataattgaataatcctgaaacaccaactggagagagtcataacttatttaaagagccctaatgtttacagaatatattctgttattaaacgagtatttgaaaaagatactattttgcttattgatgagagtaaaacaccttttcactttacatgcaggtactcaaaaattgtaaagcaggatgtcagtgaatttgaattctgaacgtcagtttgaagatggtaacatgtttagtatataaatcttttccactcaaaccatacattttaattgatattaataattaatatgaataattttataaagaccttcaaatttttttaagtaacattaggttccttattaggagagcatattattacgctgtttttagaagcagtttgacaaatagtgattgtgtttgtttttacaaatggtgaatcagttagaaaaataaaacttcagtttatttagccattatcatttacattaaaacaatatgtttttcaaataatataattggcatcaagtgatacactttttcatacttttagttttgttttaattcaaaatttataatagttgaccataatgctttatcttctttttcattttgctattttatgaaaaatcatggtcgtttttatgtcgtggcaagagtctacttgaaattttttaatatgaatttaccaatatcaaaggaagacactgaggactatactctatctaggaagatcatccaagctgtgccccacttaccttttagacttaaggttggtaagcatgttaacaacagaatagaactgcattcaaatgaaaaataaaatgtaagatccagcggacataggttactgtaataaatacattacattgggaattatttcttagtagtggcgcgaagagtgctgattctttcaacgctttagccagaatcatcttttcttttttgtttcccttttagtccaaaatacatgcttagattgatgattgatacacataattgaatcaagttgcaatgtttctgtcttacaccatgctcactgtttttttcagctgcctctggagacgtacaaacataccagattcgcacagcacccactagcactattgcccctggagttgttatggcatcctccccagcacttcctacacagcctgctgaagaagcagcacgaaagagagaggtccgtctaatgaagaacaggtacaaatactgcatttacttagattgttatgtgttaagtgtgtcttcacattctgctggatgtgtatctttacatctactggtaataggatctttgcattgaattttttttttccagcagaattaatggatcttgctaaattttctttatttaataagctgcacttataagatagctgtatgattatgggtcaatctttgatcgtggagtagttttctttcatgcagtttccccacaggagatttaatgcacaacttccctatgtctgcactccaaccagttagccaggttatttaaaaatggtttcttttcatgtatagtattgttcaagaagatcaagagtttcatatatgtatattaactgtgtgttaaattttatctatattaaatttacttgatataaagtaaatgtatggtggccagttcatgttttaatgaataatatctttactcaaaataataacattttaacacctaaagattcttcaaaaatatgttaattctaagaataccatgttacggacaaaaatcttaaaatatagtcttcaaaaaaatactacattcaaaatctgtgaaatgttggtaaagcaattctcagaaagtaactttattgctgtaaatgattttgccgtcaaaaacaataaaaataagttactaaatattggtttagaactttcatatagaagtgaccgagacaaacaaaagaaaatgaaaataaggttatgtaaaggtttaaaaagtttgaaattagtgaaagtatctcactgttcatcccaggatacttcaaacactgataaagtgaaagaagcagggcttccaagtcctagccctatccctccattttgggagaaggtattaaccttctgtacctcagttttgtaaaatgggattccagcacacacccaaagtattgttgtaagagtcaagtaagagaatcctttgaaagcactttgtaactgtagtgctctgttgaaatgggtttgtgtgtgtgtgtgcaatttcacagctcagatcagcttttttgttcctaaaatattcttagctgtcacaatgttagtaaattatatctaaactctgagaaatggcagagatttttctgggatattagaaaaagagttggaaacaagccaagtgactttttttttttctcccgagatgaagtcttgctctgtcacccaggcaggagtgcaatggtgcaatctcagctcactgcagcctccacctcctgggttcaagcaattctcctgcctcaacctcccgagtagctgggattacaggtgcccaccaccacgcctggctaatttttgtattagtagagacatgatttcactattttggccaggctggtctcgaactcttgaccttgtgatccaccctcctcggacttccaaagtgctgggattacaggtatgagccatggtgcccagccctcaagtgacttttatttgtgctccatccatctgtgattttgagtatttaagttttactaaagagaagcataaaagctgcattcataattcaaatatattttaaaatataaattaaaatctgtaaataaaaattaaaatattttcagtttttaaaaatgtttataaggaaacctttaacttaaaattagaagcaagtctgatcaagaagtctcaagcacaggctgagtagtaatatttaagacaacactgcttactaaagaaaagagttcaaagcaaacataggagcagaatcaaaaaataaatccttttgattataaaaaacaacagaaggacttctgtttatgtctatgtagtttggctgtgtggaacaaaatgtttacccccgttgactggcagaccaaatttcctttttgttctatttatttttctttcagatttatgaccactgccaccaacaagttaggaacagggcacacataactacagttcctaccaggctttgcttgcctgagatcttcagggaaactacccgacttaccatggactctttcataacattactttgcttagatatagttaccctactctttaaaaaggaaacttctcattgattctgccatagttccttttcccctttgttaccagattactgctgcttttactttttcagcctccattcactggaatctggcttctatgactagcataccgctcatatgtctataaaaaggtacaaattccctcccacttggcaaatctagtattttctttcatttaattttaactctatggagtatttgacactttcgacttctcattactctaaactcttccttggcttacttcacctggttttctggctacttttcaaatttttcctttgaaccttcatccatacccatgtatttcaggcattactttatatgctgatacttcttaattctgtatattctggctttgacctttctgccgagtgctatttattaagctccagtatatattattttattaattctacctacagtgaggtagaagcttatccccactttagaggaggagaaggtaaatatcagaaaattcaaatattttgccaaaggtcacacactttatgagattagtagaactgaaatttgaacccatatctggcaccaaaacctgtaaacatgctacttcactgattccagtatgcagccatcttctgctgtgcctctcaaaccagagcacatggcagtatgctagggatgtgtagcctaaggaggtgaacgtggagtgctttccttgaatgttcattttgctaaaatatttgagagaaataaaccttatttttaaggtaaaataagagttttaaaagaaatttataccagcagtggttttgctgcacccccagagtctccatatttggtttcctcttctagtgtggctatttcagtggaaaagttaagagaagcacactcctaagcatgctcactaggatgaatttcccttatgcacatcaaacacagcctatcttaaagtttgataggaaaagattgtaatccaaaaaattcatcactatccaaattgccatttatttcaagatgaaggtaagtggtaaacattctaaaagaaagtgtagacagctcttctgttaatttgtgttgctacagtaacaaccacgaatctcagtgtcttaaaatttcttcctcacttctgttacattttggcagctgcaggtcagttgctgtggctctccttcatgtgcccatctgggtctaggatcctgggctagatagagcagcacgtctttgagaaaagggcaatgcttttgaaagcatttgcttgattttggtgaacgttacatctactcgtgatctgttagccacagcacaggcaaggacaagcccaaagtcagtggagtgggaatgaactcttcctacaggaagtggagagtgaaaaattgtgaaagtaatacaatctatcacctttgcctttatgtaactttacattgtagggggattttaaaagcagattccctaaaggcagaagtaacaaaggaaaaggttaaatggatttgaccatataaaactataaaccccctatttaggaaagtaaaagataaagtagcaaacattttaacaaataatgtcagaagactaatgagttgagggatataaataggcagattcttagaaaatggatagggtaaaaaatttgaaaaattctaaaaaaattaaaatgtatttgatatgaattaaaatatatccattcaactatatacaactagccattaagagtaaataaaggtgtatttttattaagatgggaagatgttctcggacaaaagcaggttaccaaagagtatttacattactatcaggttttttaaatttattattacacaagtaaaacatgttcattataagtaaattaagaaacattacctaaaaattgaattacttctaatttcaccatctaaaatgttaacattctaaagtcagtttttttactcaaaccagtacaaaggtaaatatacatttttaatatatttttaagtaattttaaacttacaaaggagttttaaaaatacagagttccggatacccttcatccagctttctctaatcttagtatattacataaccagggtacatttatcaaaaataaaagtacattggtataataccattaactgaattatacattttatttccccagtttttttacttacataatccagtttgggtaccatatcgcatttaattatagtctccttcagtctgtgaaagtttgtttccttgtctttgatggccttgtaacttttgaagagtagtgatctgttttcttttagaatatccctcagtttgcatttgtccagtgttttctatggatagattgagataataggttttggggaggaattccacagaggtatagtgtgcctttctcataacatcacatccgggagcacatacataattggcgatattaactttgatcacttggttaaagtgctgtccaggtgtctccactgttgagctaccatttttctctttgtccagcccatattcaaggggaggagaattaaattccacctcctaaaagggagaatatgaaagaaatttgtggtcatatgttaaaaccaccacagtaattaggtgtattttagaagaagtacttggaggctatgcagatatattcttttctctttaaagttttgcccaccagttttagaattcatcagtaaatcttgtctacagtaattattactatttgctattctaatgggaattttgtatatctccatcccttctaatatatttaacaactgaattctataaacaagatttgtttcttctccacattatttattttatcaatacagacacatactttgggagttataatccaatactattgttatttattatgttgttcatattgttctagctttggctactgggatcttttataagtgtcttctgtgtccttttgacatgccccatttttttctttttaagcacatctttactttctgagactacaagattgtccaggttctcatcttgtgttttcccttccctagccttggaatgagctgtttttccaatgatctctagttcctttattagaaaatggtggccaatatggtgaaaccctctctctactaaaaagagaaaatttagccggggtggtggtgcacgcttgtaatcccagctactcaggcggctgaggcagaagaattgtgcgaacctgggaggtggaagttgcagtgagctgagatggcactactactccagcctgagtgacagagtgagactctgtctcaaaaaaacaaacaaacaaacaaaaaaaaatatatatatatacatacacacacacatacaccttcatatatgcacacattcttatttctgtatctttatatatagttggctctgttttccatagcccacattcaagaaaaaaagtaacaatataacaattttttaaataatacaaataaaaaagtaacctagtataacaactatttacatagtatttacattgtattaaatattataagtaatctagaggtgattttaagtatatagggggattcatataggttatatgcaaatataatgccattttatataagggacttgagcatctgtggattttgatactcatgagagttcctgggaccaatcccccacagatactgagggacaactatatacttaaataggaatacacactaacatatctgactctaagctttaaccacgtggctcattttagacttctctttgcctgtttgtaacttctttctccgacagaaacttggcttatatgtttgtttaaatctactatacatacagaaaacttgtaagaattgataatatgtaccattgtgagaaacaggattaccagttacagtgcagtatttatatacacttctttttgtttttggcctaatagtatttagcaaaagtgctgttttctaaagttacttcactctgctcctttctccacccctttcaatgaggttatatcatatgattgtagtacagttagatttgtcacaatcttcagtctgggattttctgacatccctaagtttttatccttaaatttgcatatacataagttcactctttgtgctgtatagttttatgggttttgatagatgcagtgtcatgtatctgtcaccacaatgccatatggaacaattatactagttaactaacagttatataatactaagtattctcttatatccctttgaagtcagcttcccccacgccctgaaaaccaatgaactgttttctacccttatagttctgcctattccataatctcttataaatggtatcttaaattataatttgtagccttttagatctggttccttcatctagcaaaatgcatttaagatttattgattttgttgcatgaatcagtagttgggacttatcccagataattccattttatagatatactgtgctttgtttattcactttgaatttcatcccagttatttccagttttagagaaataaagttactatcaacacataaaggtttttatatgaactttccattaacatgagtaaatatctaggagtaggctggttgcatgaaatgtaactaactgtatatttaactttttaaataaactgtccaattgttttccaaaatggctgtaccattttatattcccaccaggaatgtatgagagttcagttgctttgtatccttgccaaaacttgacattgtcaggtttattgtttgtcccccagctctagaactggtataatggatatcttatggttttaacttgcacttcactagtgactttttttttttgagacggagtctccctctgtcatgtcacccaggctggagtgcagtggcaccatgtcggctcactgtaacctctgcctcctgggttcaagagattctcgtgcctcagcctccctgagtagtcaggattacaggcacctgccaccacgtctgattttttgtatttttagtagagacagggtttcgccatgttggccaggctggttttgaactcctgacctcagatgatccacccacctcggcctcccaaaatgctgggattacaggtgtgagctactgtgcccagccttcattagtgacttttatgtgatttgctatctatatgttttctttgatgaaatgtctatttagatcttttagtcatttctattgtttgttttcttttgttttcagagaccttttttccaaatcctttgtcagagcaagtattttctttcagtctgcagctttttctttaattttcttaacattatctatcttttgcagagcaaaaggttgccattttgatgaggcccattttatcagttgtgtccttttgtacatcatgcttgtggtatttatgaattttctgcctggataggcccagcccacttacacacgtctaggagcctatggacaggcccattggtgtccacatacatcatctagggtgcctgaggattggttggtcctgcccaccagcacccactgtctggaatcatgaaggccagctcgctctcactatcacattggccacccagaggcctgcagataggcctgcctggcctgctgccaccgtaaaggcctttgtgtccacataccagccaacctgatgtccccatcctcagcaaagctttatcacagcctccactgacaaccgaagcctaagccactgaagaaatcatagatgccatgagagaatcatagataccaccattgatgacagtaaaagaaatcatacagagacaacacatctgaacccacctagaatcaaatccagagcaccctacccagctaacactacagctacatctacagtaaaagtctttctctacaaaagccagtccataaaattggataaagcagcagttgcacagatatcaagataaggacacaagaaacataaaatactgaggaaacacgatacctccaaaggaacacaataattttccactaacagatctcaaagaaccaggtaatcaataaaatgcctgaaaaggaattgaaaataatgatcttaagaaaactcagcaagaaacaacagaacacagatagacaatacaaataaatcaggaaaacaattcatgatctgaatgagaaattaaagaggtaaatagttaaagaaacaaattctggaactgaagaatttaataaataaaaaacagtcgagcagaaagaatttctgaactttaagagagaggtcttttaaaataacccagtcaaacacacactaaaaaggatgaagaaagcctacataggacatcataaagcaaacaaatatttcaattttgggagtgccacaaggagaaaatataggaaaaggcatagaaaacctatttaacaaaataatcactgaagacctcccatgtcttgagagagagatatatatccagatacaggaaggtcatatgtactaaaacagtttatccaaaaaggcctttctaagacacactattttcaaactcaaaagtcaaaaacaaagaaaaaattcttatggaaccaaaaacagcccaaatagccaaagcattcctgaactaaaagaacaacatggaaggcatcacactacctgacttcaaaatatactacaaagctatagtaaccaaaacatagtattgatataaaaacacatagaccagtggaacagaataaagaacacagaataaatctacttatttacagcaaatgtgccaagaacatacattggggaaaggacactctcttcaatcaatggtattgggaaacctggatatctgtgtgcagagaatgaaactagatacctatcaccatacccaaaaatccactccaagtggattaaatacttaaacataagaccccaaactcttagactactagaagaaaacatgggggaaatgcttcctgacattagacttggcaaaaacttcatggctaagactccaaaagcacaagcaacaaaaagaaaaatagttaagtggaaatattaaactaaaaagcttctgaacagcaaaggaaacagagtgaagagacaacctgcagaatgggaggaatatttacaaactgttcatctgacaagggactgataaccaggatatataaggaactcaaccgaacaggaaaacaaacaaaaatcctattaaaaagtggacaaaaggtctgaatagacatttctcaaaagaagacatacaaatggccaagaaatatatttgaaaagctcaacattactaattgtcagattaaaaccacaatgaagtatcattagatagaatggttattatcaaaaagacaagaagtaacaaactgatgaggatgcagagaaaggtgaactcttcctctttgtgttaggaagtatcattagttagaatggctataatcaaaaagacaagaagtaaacactgatgatgcagagaaaggtgaactctttctaactctttgtgttagaattgtctcagtgttgatgagaatgtacattaatgcagccattacggaaaacggtgtggaggtttctcaaaaaaactaaaagggccaggcgtggtggctcacgcctgtaatcccagcactttgggaggccaaggcgggtggatcacaaggtcaggagatcgagaccatcctggctaacacggtgaaactccttctttactaaaaatccaaaaattcagccaggcatggtggcgggtgcctgtagtcccagctactcgggaggctgaggcaggagaatggcgtgaacccggaaggcagagcttgcagtgagccgagatcgcaccaccgcactacagcctgggtgacggaacgagactccatctcaaaaaaaaaaaaaaggaaaaagaaaaaaacacacaaaaaataaaagaaccactatatgatctagcaatcctactactgggtatctattcaaaagaaaggaaaccagtattgcatcacttcacagtagctaagatagggaatcaacctaaatatccatcaacatatgaatggataaagaaaattgcagtatatatacacagtggtatactgtcaagccactaaaaagaatgaaaatacatcatttgtggccatgtggatgaacttgggggacattatgggttatgcaaaataactcaaacatggaaagataaataccacatgttctcactcatgtgggagctaaaaattttttgagcttatggaagtagagagtaaaattgtgggtattagagcctgggaagggaaggtgagatagggagcatggggagaggttggttaatggacacaaacttacatctaggttggtagaatgatttctggtgttctgtagcaccatagggtgaatatggttaaatacaacttgtgtattttcacaaagctagaagtgaggattttgaatgttcacaacccaacaaaatgataagtttgaggtgatggatatgctagttaccataatttgatcattacatactgtatacacatattagaatattactgcatctcataaatgtctacagttattttatgtcaactaaaaataaaaaggaaaaaagaattctttgcctaaatcaatatcacacagacttcgttttcctctaaaagtgttatgttttatgttagagttttatatttagatctataattccctcctgagtttacttttgtataaggtgtgaggatgtgtcgagatccatttttttatataggaacatccatttgttccagaccatttgttgaaaagactattctttctctattgaattgcccttgctctttttttcaaaaattaattgaccatatttgtgtgagtctgtttcttggatatctttccattgatctttgtgtctgtcctttagccaataccatgttgccttgagttctgtataataagtcttgaatttgataatgtgagtcctccaactttgttcttaaaattgtttggctattctggttcctttgcactttaatgtatattttataatccgcttgttgatgtctacggaaagtgtgctagaattttagttaggattgtgttgtgtctatagatcaaattgtgaagaagtcacatcttagcaatacttagtttttgattccatgaacacaatataatctaatcagcacatagatcctgtacatatcttactggatttatacccaagtatgaactgttttctggttttttttttttttgtgtgtgggggtggggggacatgtgctatttgaaatggtatattcaattgttcattgctggtatatggaaataaaattggcttctgtatatttaccttttatcctatgaccattctaaatttacttattagttctaggagctttgtcggggggggtgtagattctttgggattctctacacaaattatcatgtcacctacaaatatggacagttttaattatttctaatctgcatgccttttaattttttttccttattgcaatgtctaggacttgtgctatgatgttgaataggagtggtgagagaggacatctttgccctattcttgatcttagggggtgtattagttttctattgctgcatgtcacaaactgccacaaacttactggcttaaacaacacaaatgtattgttttccagttctataagatcagaggccttcattggatctcactgggctaaaatgaaggtgtcagcaggactgcattccttcctggaggttctaggtgaaaatgtgtttctttgccatttctagcttctagaggccacccacattttttgcctcatggccccctttctccatcttcaacatagtgttatctctgttccccttctgcagtcacattttcttctgctttcctgttctacttttaagaatgcttgtggtttaactgggcccactcaagtaacccaagataattttcctattttaaggtcagctaattaacaaccttaattccatctgcaacctaattcccctttgccatataaggtaacatactcacacactgcagagattagtacatggacacctttgggggaccttaagtaatgtaatagctgtagggtctctgtaaaaagctcttcattacatttttttaaaaactctctttgatttttagtttctgagagttttcatcataaattgttgtttaatcttgtcaaatgcttttccagaatctactgaggtgatcgtgttgtttctcttatttggtctgttattagagtgaattacattcatactccaattttgagatatgcatgcattcctgggatgaacccccaattggtcatgaagtatcatttatacattgctggattcaatttgctaatattttgttgaggatttttatgtctacgtttatggctaatatgggattttagtttctttgccgtgagtttgttattagggtaatgctgaccttataaatgaggtggaagtcttcccttcccttctctttttctggaagagattataatatttgtattatttaagccttatatggttggtagaatttgccagtgaacccacataggcctggagttttctattttgagaagttttttttttttttttttttttttaatagatacgggatcattcagactatttcttcttcagtgagttttggaagtttgtgtttttaagacattggtccatttcttcaaagttatcaaattcatgaccatagagttgtttgtagtgttagtttattattcttttactgtatgggatgtcagtagggatgtccccccgcttcattcctaatattgttaatttttgtctttcctctctctctgtattcgccacccctaccccagccaccctcctttttttttaagtctggctaaaggtttatcaattttgttgattgtttttaagcaaccaaaattcttagtttcattagttttctccttagaattgtattgatttgtactctgatctttgttattttctcctgcttgctttggtttttttagttgttctctttctagtttcttttttcattaactgtaaattttttcctattaatatatacctttgtcttatttcagtttctaagaaaacttctgcaggtatctagtttcttaagacaatagttggatcagtttggcaaatcttttgtaaagggccagatagtaaatatttcaggctttgcagaccaaatgatctgtcacaactactcaactctgccgttgtaataccaaagcagcgatggataatactgactgtgttccagtaaaactttatttacaaaaacaagcagggaagcaaagtttggcaacccttgatataaataattgatttaagccctttttttctaacataagtatttaaggctgtaaatttccattttagcattggtttagctgtgtcccacaaattttgggttgtcatttttatttgcattcagtttaaaaatttttttatttcctttgagacttcttttttgacctatagacttagaaatgtttaatattcaatttccaaataatcgaggatcttcccaggtgttttatggcccaagaacatactttgtattatttttattctcttaaattatcaagtatcatatcaatgtcagataggtgtagttgattatgtcattcaggtgtactgtatcatttttaattttctacttattctgtcatctctgagactctacttagtctatcatcactgacaggagagtgtattaaggcattcatccctttgttcatttctcctttcagttctattagcttttgcctcatacaggagaattacatcttccatttagaattatgtcttcttagaggatagacctctttattattatataatgtctttctttatccctgacaatattccttcttcagaagaatgctttgtctgatactaataaaactaccccagttggtttgttttgtttttgtttgttgagacagaatcttgctctgttgcccaggctggagtgcaatggcagtggcacaatcttggctcactgcaacctccacctccctgattcaagtgattctcgtgcctcagcttccaaaatagctaggattacaggtgtgcgccaccacacccagctaatttttgtatttttagtagagacggggtttcgccatgttggccaggctggtctcaaactcctgacctcaagttatccgctcacctcagcctcccaaagtgctgggattacaggcgtgaaccaccattcccagcctccttttgattagtatttgcataatatatatccttctccatcctttttcttctctgtttatatttgaagtgggattcttgtagatggcatatacttaggtcttccttttttactgagctacatgccttttaaatggtttagatcagggattggcaaactatggcacaagtagaaatttttaattttacatttatatatttaattttcaattgtcttcatttccttatataaatccatgttttaatctattatatttctgcctcaaaaactcttttttacatttcttagaaaatagatcttctggcaatgaattccctctagttttgtttgaaaaagtttatttcatcatcatatttgaaagatatttttgctgggtatagaattctgggtttatcatttttttctttgaagtgacagactttaaagatgtcacttaaggctgaggtaggcggatcacaaggtctggagtttgagaccatcctggccaacatggtgaaaccctctctctactaaaaatacaaaaaatgagctgggcgtggtggcacacgcctgtagtcccagctactcgggaggctgaggcaggaaaatcacttaaacccgggaggcagaggttgcagtagcccagatcacgccactgcactccagcctggcaacagagcaagactccatctcaaaaaataaaaaaagatgtcactttttttcttatgatttaaatggtttctgacaagaaatctgtgtgtatataatgctccttttcttcctctgcctctgatttgcagcaattcaaatataatatgcctagggattttccctctcttccctccttcctcccccatccccaccatatttatcttattcttcttgtgtctgtggcttggtgtctgtcattaattttagaaaattcttggccaggtgcagtggctcacgcatgtaatcccagcactttgggagaccaaggcaggcggatcacgaggtcaggagattgagaacatcctggccaacatggtgaaaccccgtctctactaaaatacaaaaaattagctggccatggtggcgcatgcctgtagtcccagctgaggctgaggcaagggaattgcttgaacctgggaggtggaggttgcagtgagtccagattgcaccactgcactccagcctggcgacagagcaagactccatctcaaaaaagaaaagaaaattctcagatatactttcttcaaatatttttccgtcctgtcctccctcttcttctgagattacagttataaatatgttaggatgttggagacggtcacacagctttttgttgttctgtcttcaagttcactgattgtttcctcagctgtgtcagttttacttaccagaacatcaaacatattctttatctccatttccatttgattccttttcataatttccatgccactgctgaaataacccatctgatcttacatgttatccaccattcctattagagcctttaacatgttagtcatacttaaaatttgtatcaaggctgggtgcggtggctcatgcctgtaatcccagcactttgggaggctgaggcaggaggatagcttgagcccaggaattcaagacctgtttggaaaacataggaagacactgtctctacaaaaaataataaaataaattagctgggcatggtggtgcatgcctatggtcccagctgctggggaggttgaggcaggaagatcacttgagcctgggaggtcaaggctgcagtgagccctcattgtgccactgcactccagcctgggcagcagagcaagaccccatctcaaaaatgaaaaatagaagcaaatgctacttttttctgaattgatagttacatgaggatgaagacatcaatggaattacaatgtactgccatttggagttacctaaaaataataatagctaacacatcttcaacatgctaggcactatattgtgtgctttacatatattaactcatttgatcctcacaaacttttttttttttttttttttgagacggaaacacctatcacccaggctggagtgcagtggcgctatcttggctcactgcaatctctgcctcctgggttcaagcgattttcctacctcagcctcccaagtagctgggattacaggcacctgccaccatccccagctaatttttgtatttttagtagagacagagtttcgccatgttggccaggctggtctcaaactcctggcctcaagtgatctgcctgcctcagcctcccaaagcgctgggacctgggattacaggggtgagccaccacaccagccctcacaaaccttttgaggtagaaaatattaccatgtccttttttacagtcaggaaattaaggttaagtaataagattgtggcccttgaccacacagagctaaaaaagaatttactggtttagattgagcagcttgctaaagaataatttttaattatttttaatctgtgttagatttttttaaataatttcatttttaattgtggtaaaaaatataacaaaattgaccatcttaatgagttttaagtattcagttcagtcatgttaagtacattcatattgtggtgcagtagatttccagaacttgttcatcttgcaaaattgaaactctgtacccggtaaacaacaactccccatttcctcgttcccccagcccctggcagccactaatgtaagtcctgtttctatgaatttgattgactttagatgcctcataagagaaattacacaatatttgtctttttgagactagcttgtgtcagcataatgccctcaaggttcatctacgttttggcatgcagagggccttcctaaggctgaataatattaatattacattgtatgtatataccacattttgcttaccactcatctgctgatggacatttgggctgcttccacctcttggctattgtgaataatgctgcaatgaacatgagtgttcagatatctcttcaataccctgatttcagttcttttggatctgtagcaaaaagtgggattgctggatcatatggtaaattttgttcttaattttttgaggaacctccattccattttccatagcagctgcaccattttacattcctaccaacagtacacaagagttccagtttcctcacatcctcatcaacaatgggtattttctgctggtggtggttttttgatagtagccatcctaatggttgtgaggtgatacctagtggttttgatttgcatttccctagtgattagtgatgttgagcatctttttttttttttttttttttctgagatggaggctcgctctgttgcctaggtagagtgccgtggtgcaatctcggcttactgcaacctctgcctcccgggtttaagtgattctcctgcctcagcctcctgagtagctgggactacaggcacccaccaccatacctggctaatttttgtatttttaatagagatggagtttcaccatgttggccaggctggtcttgaactcctgacctcatgatccacccgcctctgcctcccaaagtgctgggattacaggcatgagccaccgcacccagcctatattgagcatctttttataggccatttatatatctctggagaaatctctgttcaagtccctatgcccattttttaaattgggttattttgctgttgagttcaaaagttctttatatattctagattttttttttccctttcttttgagacagcatcttgctgtctcccaagctgtggtatagtggcatgatcatggctcactgcagcctcgacctcccggcctccaacctcagcttcctgagtagctgagactacacgcacacaccacctaactaatttttaattgagacaggttcttggtttgtcacccaggttggaatgcaggtggcaggatcacggctcactgcaacctaagacctcctgggcttaagcagtcctcccacctcagcttcctgagcagctgggactacaggcatgtgccaccacacttggctaaatttttaaaaatttttttttagagacagggtcttaatatattgcccaggctgttcttgaacacatgggttcaagagattctcccacctcagcctcccaaagtgctgggattataggcgtgagccatacaccttgcctattctagatcttaaccccttagcagatatatgatttgcagatatttcttctcattctgtaggttgccttttcactatttattgtctttcgatgtgcagaagttttttagttggatatagtcctatttgtctatttttgcttttgttacctctgcttttggtgttgtatttaagatattactgccaaatccaatgtcagagagtgttttcttctagaagttttatagttttaggtcttacggttaggtctttgatctattttgagttaatatttgtgtacaacataaggtgcggcccaacctcactcttttgcatgtggatatccaggtttcccagcaccatttgttgaagagactgttagatttttttaaatgccctgaaatgattagtttgtaagattttctatttaaaggattgttacacattgaaatttagctttaatgttttcttagttattgatatggatagaatttcaagttttgcaggaattatgcagaatattttaattaatagtaagatgtaatttttaagtggtcatttaggtcttgtttgtttatggagttgtttttttgtttgtttctttgagacggagtctcactcttgtcactcaggctggagtgcagtggcgcaatctcagcttactgcagcctctgcctcccaggttcaagcgatgcccatggctcagccttccaagtagctgggactacaggcatgtgccgccacaccccgctaatttttgtgtttatagtagagaggggtttcatcatgttggccaggctgatcttggactcctgacctcaggtgatctccctgccttggcccccgaaagtgctgggattacaggcgtgagccgccacgcctggccagattaaaattttaatataaggtaatttccaagtaattctgtatatcttttccaatgcttaatatatactaaaatgttggttgctgtgagctatttctttaaaaaagaaaaaaaaaaggtaatccaaaataaatatgtggaaatcatttgcataatttttcccgtcctcttttgcttgtagggaagcagctcgagagtgtcgtagaaagaagaaagaatatgtgaaatgtttagaaaacagagtggcagtgcttgaaaatcaaaacaagacattgattgaggagctaaaagcacttaaggacctttactgccacaaatcagattaatttgggatttaaattttcacctgttaaggtggaaaatggactggcttggccacaacctgaaagacaaaataaacattttattttctaaacatttctttttttctatgcgcaaaactgcctgaaagcaactacagaatttcattcatttgtgcttttgcattaaactgtgaatgttccaacacctgcctccacttctcccctcaagaaattttcaacgccaggaatcatgaagagacttctgcttttcaacccccaccctcctcaagaagtaataatttgtttacttgtaaattgatgggagaaatgaggaaaagaaaatctttttaaaaatgatttcaaggtttgtgctgagctccttgattgccttagggacagaattaccccagcctcttgagctgaagtaatgtgtgggccgcatgcataaagtaagtaaggtgcaatgaagaagtgttgattgccaaattgacatgttgtcacattctcattgtgaattatgtaaagttgttaagagacataccctctaaaaaagaactttagcatggtattgaaggaattagaaatgaatttggagtgctttttatgtatgttgtcttcttcaatactgaaaatttgtccttggttcttaaaagcattctgtactaatacagctcttccatagggcagttgttgcttcttaattcagttctgtatgtgttcaacatttttgaatacattaaaagaagtaaccaactgaacgacaaagcatggtatttgaattttaaattaaagcaaagtaaataaaagtacaaagcatattttagttagtactaaattcttagtaaaatgctgatcagtaaaccaatcccttgagttatataacaagatttttaaataaatgttattgtcctcaccttcaaaaatatttatattgtcactcatttacgtaaaaagatatttctaatttactgttgcccattgcacttacataccaccaccaagaaagccttcaagatgtcaaataaagcaaagtgatatatatttgtttatgaaatgttacatgtagaaaaatactgattttaaatattttccatattaacaatttaacagagaatctctagtgaattttttaaatgaaagaagttgtaaggatataaaaagtacagtgttagatgtgcacaaggaaagttattttcagacatatttgaatgactgctgtactgcaatatttggattgtcattcttacaaaacatttttttgttctcttgtaaaaagagtagttattagttctgctttagctttccaatatgctgtatagcctttgtcattttataattttaattcctgattaaaacagtctgtatttgtgtatatcatacattgttttcaataccacttttaattgttactcattttattcactaagctcgataaatctaacagttactcttaaaaaaaaaaaaaaaagactaaggtggattttaaaaattggaaactgacataatgttaggttataatttctcatttggagccgggcgcagtggctcacgcctgtaatcccagcactttgggaggccaaggtgggtggatcacctgtggtcaagagttcaagaccagcctggccatcatggtgaaaccccatctctactaaaaatacaaaaattagccaggcgtggtggctggcgcctgtaatcccagctactcaggaggttgaggcagcagaattgcttgaacccaggaggcagagggttgcagtgagccgagatagcaccattgcactccagcctgggcgactccatctcaaaaaataaaaataaaaaaaatgtctcatttgggaaggaaattccttttaaaaaagagttgagacacttagaaaactaatgttttatatttagtcaagagttatttaagaaagtcaagcttgtttaacaacaaaatatgaagatttaagtgttaattgctggatccattttaaaataagattttaattaacatttgtaaatggtatattttcgtttgtaacaaaccattgtcttttttcaaggatgaacagagtttatgaaggagcatcattctaagaattaagtgatgtagtctttatgtttggacagttcaccagattctcaagaaggctttcaaacaactataaagtttgatgtttgtcctgctgagctaatggggaaagttatagcataaaaattgtgtaaccgcatagatatgtcatttttaaaaactggtttaacagaaatcaagcaaagtcacaaatatgttcacaagttggaattatttattgagtcaaaatgtcgaatcgaacattttgaatgaagtaagtgttataaatgaaaaattgcctgatgtttagcagtttgtattctctaaagctttttttcaaaagttcaggctttctacttactgggaagttggtggtcctcttagtccctgataaatcaaggcaatcacattcatgtgagctggatgaatttataagttataaagaccttatccttcataccttgaggatgattgcactggttttgaagtcagttgcttaatgatgaggtgagaaatgtatcctgttgctaaatctgtcttagacccttggtgaaacttgaagatttcagtttataaagataaaatcaagcatcttttgtgcagttttctttttttaatgcaagaatggtggggaggtttgtttgtaagcatgaaactttgagaatctttattaagaaaatgacataatttttaaaaaccttgtagccaagaacatatgtggccacattaccagtaataaatgtttttctctttatattggccaaaagggaataaaaatgtcatcataggaatttgtacatatgctactgatttgcctagaaaatagcaagtttgatattgctcactttgcaaatatagggccatgtggcacttttatctataggacagattaataaaaatgaagtggggaggggtttatttttgatatattactcttatgagttttcaagctttgataatgtttaactgaaaagtggcttagaaagggctagatccaatgtgttcattattaaataattgctatcagatacaattttaagttcattctttttcaaactcaagtaccatattggcaaccataatattgtcataggtgctctcttcatttagatattcttggggggggtggcatttgtataatatatgtgtacatatatatatatatatatatatatacatacagtatataatctaaagctctgagagctcttaagtcaggaatgctgagtattatagtatattgaggtcagatgaaattttacatttttgtgtgttctgttgcattccttctggtagtttctatgactgcattactccagcactcatgattgattttatcttctaattttcttccaagtattttattttttattagttttctttggcttgatacttttaaatatgttactagtcacttgaaagcctctcccccaaaagtatttggtttgtatgctttgtctgtggcagctataacagtggtaagaacattttgaagatagctttttaaaggaaccactgattttttcaaaaatcatcctgggggaggaattttggcatttcatttgagcagggattttgtcagaaaatgtgttttgatggtaggtcagcagcagtgctagtctctgaaagcacaataccagtcaggcagcctatcccatcagatgtcatctggctgaagtttatctctgtctctcaggataaatccctgtaggacaaatccctactatcatttctaccttttggggtgacatgtggaatcatacaaaggcttaggaagaaatacgtttgtttaaaccaggatgctttacttacttgaagtgacttcaatctagatttcttttaatatttaacaaatttttaattctatgatcagccacagtcagctattaccataaattggtctctgtttattttgaagatcacggctgcttcattttgcaggattaagtagggctaatgtatcttaaagttaagatcttgaattaaagtgagttttagaaatagtgttacataccttttcagttgttttcaagaggctttatttttgttgcctttgtagccctgaaagctgttggtatattttttccctcatggacccaatagaaaagttgtatatttatttggattatatttacattctgtcctttgtaaatgtttggtgtaacttgcacttttttaaatgacccagtttgggtattagcaacttaagaaattccctcatcaagtaattctcaactttttagtctttctcctctcttcaaatcatgtgactttttaaatggaagtttttcattgattaaaatattttagcacctaaaagctagccttaaaaacagctgtaaaagaaaaacatcaggaaattagatatgactagcccagttaattaaaagacgggctcaaaccttgttttattctttttcatcttggatgaagattgaagggaaaataactcaagtgcataatatttattttcaatttttaatgagactttatcctcatcacaacattaatactgtacatagtatgccaaaatatccattaatttgtctagaatagtacaagactttttaaagcaattgtcctcacagagaccacatgtaatatactgaaatatgttcatttttaatggctttgttaacatcaaagaaatgctgcctaaatttgatttcagatgaggaaggagaaagtaaagtgtgcatagtaaggctgtaggtgaagagttgtgagataaatagttcactcagttgtacaaagcacaactagaactttttgttgggaggcttacatacatcttgaatattcttaatgtaataatgttgactattaagttggctacacagtcactgtatgtactaggaactggtttccttgacattctagaatcaatggctaggagaggcattaatctttgaggggctgaacatatcatgaagctgagtcagtatggaaaattttcaaataaacagggtgctgaagttccatctgtctcatctgcttatgataagttcttattgattagtgaatgtagcttaagcctttgtatgtgtcctcagggggcagaccgactttaagagggaccagataacgtttgaatggagggattatatttcaggtgttttagcttgaaatttattttttaaaaaaagaaaaatttaaaaaatatataaataaaatagaacaaagccggtgatgcaagttgatattataaacaggcagttttagcacagaaagaaaatactgacctgtctgcattctggtacggtgggtgcaggtcccagctgggtatgacatgatacatttttaattattctcaccagcaagtaaaaggaaaatgaacaatcttttggaattgtctttgaaaaggatcaaagagtaggaaattcacatttgacctaacattacttgcctatagaagtatggcatttccaagcttttgtctgaggagcatctcagagaagtgagagtaaatctgagttagcttaaaaattggtagggaggaagaaaatctctgcaaataatgattttatgtttgttggccaagtgaaatgatctatcattgtgtttgggaggttttattttcttatgtttttaaaattggtaaatgctttatagatgtatttttatccaagtgccactccaatttgtgtatgtaataaaattatttatattaaaagtgggaaataattgtcaacattttttttgagtatagatttattaggggtggcaaagaagagtgctagttagcagttttccatgtaaagttgtccttgactgatttgtccacatgtcagttgtaactcccccactccctgcaaaaggaattatttctaacccagatgtatcacttgaaactttttagaagcaaaataatcagggaagttcctagaaaggtgtttggctttttggtttttgagggttggggtaaagaagacttcccccacaactgtcagcacaaaacagggtattgatttttaactctgatgtttctattggagttgaatactaaataaataactataatgagggaaatacatttctaataaaattccctacattctagaaacatccctgttttaatttttttatctaaatctttttgtgctttatgtgtaaagaaaaaaatgtactgagttacaatgcattttattaacactatgtacataatagctgctttgtgttcagaatagtagcagttgctttgtatattaaagtgatccttgtgaatttgtgaaatattgtcataaagtgctttttcttactgtaatctttgtggtatcaactgtcataatgctctttttacacaaacatttatgtgcagtcacataaacatgcttttaaaaactctgtaagtctcttttttggggatgggatctctatattttgttgggttttttttgctagtagtgtgaagccatgttttattggacttaaagttacaatatattacaagcttgtgttggaaggcagcaaaactaattcagacaacaacatgtcttcagttactggatccctaattttcaggacaaaacctgtttttcaataagattgaacagtgcctatttgtggatttggagatgttactgtcaagatgactaatggagacatacgaccagctgtgtctgatgtcataaaacacgtgttcactgaaaggacaataagactatataccttctcaggtccccttgcaattctaaaactctgtgatcatataaattggaaggaaaggggaggggatatggttaatctttgcttaagctgtaagaataaaaaagttatctcctatactattaacttctgaaataagttctgagacgagacatctgaaaataagcagctgcattatttgtatgtttcttcactgccaagatgtgttcaagcctgctatacctgccattgtattggaaggcttaatgaatttcatttattttctgcaacaacgattac

SEQ ID NO: 19 - DNA, 197845 bp, Homo sapiens
acaaaacccaccgattccccacgtcgttcagcaaagacatcgtgggtggagccaggagggagcgattgagtagaattcctcgcggccgcctccgcccgcccaccccgcgcccccggccctcggccccctgccctgccagcccgccgggctcggcccgcagcggaggtcagggagcagcgagcgcctcctcccacccgggcttcccgagtactcggctctgctgctccgtagtaaacaaagtgtcgccggcgcctccacgctggtttgcttcctagcaatcaaaacactgagaaggcgagagaatcacagaaacactcgagaattaccagaaaataatagagatccaaaaaaaaaaaaaggaggtgagtgtgtgaaagagaaaaacaccccactaccccccaccagcccaccgccgcctccccgtggaaaaccgggccccacccagcccggcgcccactggctgcccgggcggcggtgccgcatgcccattggccgcgcgggctgtcggtcaggggcgggccggcgcgcgcgccgccgcgggcggggggcggcggcagatcccgtaagtcgggcggcctggtagtcgcagcagccgctgccgcagccgccacattcaacaggcagcagcgcagcgggcgcgccgctggggagagcaagcggcccgcggcgtccgtccgtccttccgtccgcggccctgtcagctggagcgcggcgcaggctctgccccggcccggcggctctggccggccgtccagtccgtgcggcggaccccgaggagcctcgatgtggatggccccgcgaagttaagttctgggctcgcgcttccactccgccgcgccttcctcccagtttccgtccgctcgccgcaccggcttcgttcccccaaatctcggaccgtcccttcgcgccccctccccgtccgcccccagtgctgcgttctccccctcttggctctcctgcggctgggggaggggcgggggtcaccatggccgaggcgcctcaggtggtggagatcgacccggacttcgagccgctgccccggccgcgctcgtgcacctggccgctgcccaggccggagtttagccagtccaactcggccacctccagcccggcgccgtcgggcagcgcggctgccaaccccgacgccgcggcgggcctgccctcggcctcggctgccgctgtcagcgccgacttcatgagcaacctgagcttgctggaggagagcgaggacttcccgcaggcgcccggctccgtggcggcggcggtggcggcggcggccgccgcggccgccaccggggggctgtgcggggacttccagggcccggaggcgggctgcctgcacccagcgccaccgcagcccccgccgcccgggccgctgtcgcagcacccgccggtgccccccgccgccgctgggccgctcgcggggcagccgcgcaagagcagctcgtcccgccgcaacgcgtggggcaacctgtcctacgccgacctcatcaccaaggccatcgagagctcggcggagaagcggctcacgctgtcgcagatctacgagtggatggtcaagagcgtgccctacttcaaggataagggtgacagcaacagctcggcgggctggaaggtgagtggactcggcgcgcggccggaccttgggggcgcggtgggtcaggcgagggcgcagctgtgcaggtttgctcggcctgaaggtgcggagcaggagggcagcgcgttcccaggagggcgggcgagaagcggtggtcgcggtggcctcgcccgggtccggtcggggacggcagtaggtgtgcgtgcgcgccagtcaggagttcgcgtgggacgcggtaaggggctcgttggggaactaagtaaagaaagtgcgccaagaagtggacgtcagagcgaggccgaaaagtttgccagtgaaaggagaaaggggttcgctgggagcggcaacccccggcccgcgccgactgcttcggctgccccttccctcccggacctccgcggggggagggcgggttctctccggccgcgccgcggagctgtttccgccgggcgcggcgggggagggcgcggcgaggggccccggagcctcgctgccccgggaccgggctgcaggtggaggggacaggcagggcgcgaccggccggggacggtgcagggcctgccgggcagtttctggaggcggtgcgcattttgctttgttttggttttctccggagtggcctcgagtgccgggggcccggcgtcccgagcccgaggtggtgcctccgacacgtgcgaaggggcggccaccgcctgcggagcgccggcgcctggccgcgcggggcgagctaaagttcaagtgtgaccctcggcgggggcgggcgcgggcggtggcggtggcggtggcggtggcgtgggaggggccccgggcgcaggaagcccgcgcctttaaagggccagcgcgtcggggccgggcgccgtggggccagcgtttctccatgcggggaagcgcccgaacttggtcttgcccctggtaggaggcttttagttagaaacacagaggctgccctgaggggccgggggctgggatgtgtgagtcttttcctgccttgccaccctattcttgagcatggaggaccaggcgggggggctttgcgaccaatgttttgagggagtcggagtggcggtgcgcgtcgagggagcggtgccttgaaggaggatttttgccatttttgcctttcagagcgtggccaggagagacttagcgtgggggcaggcacttcccgactccgaggagaaggcccgggggccctcggctccggggaggcttcccgggggcggggtccagtcgtggcgcggcctccccaagctgacagtttctcactgtcaccggtggcggaattgctgtaaaggctgtctagttgagctaaacacctccctcccctcctccgagacggagtctcgctctgtcgccaggctggagtaccgtggcgcgatctcggctcactgcaacctccgactctctggttcaagcgattctcctgtctcagcctcccgagtagctgggattacaggcacgagccaccacgtcgagctaatttttgtgtttttagtagagaccgggtttcaccatgttggccaggatgttctggatctcctgacctcgtgatcggcccgcctcggcctcccaaagtgctgggattacaggcgtgagccaccgttcccggccgagctaaacacctttttaaaacatacctttcttcgcctctcatattggactccacggcataataaagattggtctttgctgcgcagttgttaacaccaaggttattttacacacagtgtcatccctgtggttaatgcgtgtcaaaagggttaagttactcacaccttattgaagttcctttagaaggaattcaagattcattttattttttccaaagtgtgttttagagtaaaggtatcacttatcgcttcattaccaggcattacatgcaattttaccaagtgtttcaaaaaagtaaagtgccttcttaccgttaagttcagcatatattctattaagtcacaaaatcgaaattgtctgccaaatcttgttttacttaacatttgaatttaagtacttgacttacttgctcatctatcaattccacttcagctgttacagagtattagccatttaaaaaaaaaatcctcccccctttttttgcattcaaagtacagtgtgtacttacaccattctttagtccttggaaatggatacaacctacttcaacttgctggagtgcctttctttaaagataaaggaagtgttttgggatatttttagttttgcgtctcaaatggcattgtcagagtgttagtcttaaactaggaatatgcttacactttttaagatttaggtttttaaaaaatagattctgatgttaaatcatctttacaaccatttttatcaggttcttgttctgatttttttaaaaatgcaagaataatttagtttttttttaaatttatttgccagagctaggagacctgttaagttatctgtctggaattggaggcccttgggcagctcccagtgggagcctaatggggctttgctttggagtaggctgcctttctcaaatgagtaagtgtttcaggtgtaatgtcagttggtttaagtctgattgcagcaagtacattttcagtttgagtaaaagggtattttaagaagaaaagaaacaacctgagctgttctaactcataactagtcttttggttagtttcataaaaatgagttacttgttaaaaccaagtttcactctcagatctgaaagactcctgttctaagagtcataaaagagaaattttactatgaattttaacttaaatccagtttttaaatgcaaagcaaccaaaacttaactgttttaggaccgaggagaggttgctttggcacaaaatatttcctgtgatttactactgggaattaggctgaatctttaattaaatagtttcttgtgtgctgcttcctggggcctgcctgaaagtttgagtcatttgcataggacaaactagttggaaaactgttaatgaattcaaaaacttttaatgtcattctttagatagttaagtgctggttatatttgaaggatatgcattttgtgtttgtggggatggtatgttaaatgtcttacacttgttgtaatattggctagaattgctataaggtcacacacaaagtggaacctaagacttttggaaaacccgggatcttctaaatctagtgcagtatttataaataatgaaacttcatttccatgacctgttttttcacatagaaagccttctaaagcttgggaagtggtagtttgaactctgattttttttaataaatggcagttttgagttgactcttttgatattattaggaacactttaggttaaaagaatgactttgactataccacttaactcttgttaaataaatttttagattgttttattagaggtatcctctttgatttaaagataaatatcttttttttttttttttttttttttttgagtcagagtctcactctgttgcccaggctggagtgcagtggcgcaatctcggcttgctgcaacctccgcctcccaggttcaagcaattcttctgcctcagcctcccgagtagctgggactactggcacgtgccaccatgcttggctaatttttgtatttttagtagagagggggtttcacatattggcttggctggcctcgaactcctgacctcgtgatctgcctgccttgatctcctaaagtgcagagattacatgcgtaagccaccgtgcctggccccaaagctttttatttttaagataaatctttaattgggagtgatgtttcttatttggcctatgaactgacagtggatttccttatgttttgaaataaatattctgtaatttgggtataatctataggtgagtaattgaaccagccacagagatcccgttagaaagatggctgcttttttgttgcatggtcacatttgacttagagaatcctggtgagaccgagtggttagaggatctgagacatctttcctacttctggattgtcactgaaattaccttaaagaaagccttgataggctgggcgtggtggcgcacacctgtaatcccagcactttgggaggctaaggtgggcggattgcctgagctcaggagttcaagaccaccctgggcaacatggtgaaacctcatctctactaaaatacaaaaaattagccgggtgtggtggcaggtgcctgtagtcccagctatcgtgccaataatcccaactactcgggaggctgaggcaggagaatcgcttgaacctagaaggcggaggttgcagtgagccgagatcacgtcactgacctccaacctgggcaacagagggagaccctgtctccaaaaaaaaaaagaagaaagccttgataatcctgtatatgtacttggggaagcgataatgaagaaataatttaaaatggatgagggggttatgcagctaaatgtagcatcttattaagggctgaaagttacctgaatctatttgagagctaaaacattttgttcagaaattccaaaatagatgccaaattggaatacttcatttcagactcccaagagctttactttttacgcatggttttgtggcatgtccttggttgaggggatggcgagaagagtggcctctttttgaatgattctcatttttgttgttgttgttgttgttgttgttgttgttgttgttgtttttctgagccagggtctcactctgttgcccaggctggagtgtagtggcttgatctcagctcactgcaacctctgcctgcccctggctcaagtgatcctcccacctcagcctcccgaatagttgggattatcggcacgagccactgctcatggactagttttttttaagtgacaaacacttgactattgaaaataaggcattttaattctcatgtaaacttgaaaaaagttaaaggtcttcaagatcccaaaattgctgaaaaggtatcacattagcagcagacacatagatttcatgctccgcacacacaaggaatcttctccgaggcgatacgaaatgggatgagggggaagaatattcagtggcaagttagaatgccttgcagactgtaaacatgttgcctgtccttgtgcttctagccccttcatccaagcatctaaactgcagttttgtgttaggctttctaagatagcagctgtatttggctggaatttctctggggaagcctgaatgatttgcatttttctggaacactctgcccttggaaactacccagttccctggcatcatgggaatttacccagccatttttttggcctatatgtgctgtagctttggggctttttggggatcctcttggaaaggcagtgtaaataccacatagtgattggggaaggcagaattttcaattgtgtgggagttggtctgcttccctgcagttcaagatttgcctttgcctttgtagcaacaacttgcagagacttgcccagcccccccaggatctccctggggtcatataaccaagcaccttttcttggtacataaagaattctgatgcttctggtggtgttcctcagctgtgaaacagaagaccacatgtacttgaaaaagtatgtattttgatgcctaagggatatgctgtgtacaaatacttagagtgtggaagacatcttcctctttgccagttgctgatgaggatgaacaaaaatcaagtcagtggcacagaaattcttttgtaggtattactacttgttatttgtagtcttctaaggaacataggaaacatgaaaaacacatttttgtacgttggctattttatatggttcagcctttttaaaaacttgctttattcattagcatcccagtttactctattccgtcttctccctgtggtttatcaacttgtaggttaagcaccgccaatagttgaatctagggttgacttattcttgctacttggcaggcatttgggctactttttttttctttcatccatttttgtatagttttgataaaaactaaaaaggaaaacaaaaaagcaagttagttttgatattaagtcaaatactactaaaaaggtaaatctgcagctcctcatcatacaatttagtgaatttttaccttcacttattactttaataaggacataagttcaaaatgtgtcctttatttcaagccatattcattacaggaaaaaaaaaaaatcaagggagagctgtttagggaattagcctgtgtagcccccaattctggtttttgttctgatgatccctgaagctacactctttatgagagttgggcgtgtgtgtgtctaagtcttccttttcttttcttttctttttttttttttttttgagacggagtcttgctctgtcacccaggctggagtgcagtggcgtgatctcagccccctgcaacctctgcctcccaggttcaggtgattctcctgcctcagcctcccgagtagctgggattacaggcacatgccaccacacctggataatttttgtatttttagtagagacagggtttcaccatgttggtcaggctggtctcgaactcctaacctcgtgatctgcccacctaaagtgctgggattacaggcgtgagccactgggcccagcctaagtcttccttttcttttctttttcttttttgagatggagtcttgctcagtcatccaggctggagtgcagtggtgcaatcttggctcactgcaagctccgcctcccgggttcacgctattctcctgcctcagcctcctgagtagctgagactacaggcgcccaccaccacgcccggctaatttttttttgtatttttagtagagacgggatttcaccgtgttagccaggatggtctccatctcctgaccttgtgatccacccgcctcggcctcccaaagtgctaggattacaggcgtaagccactgcgcccggccacgtcttccttttcttagctttgctttgagaaatcgtttcttatcttggattccattacaatggtcctcctgccatctggcttctccagttggttcgcttatttttccttctcctatcctcattcataagtatacctcaggactagttgtggactttttctctggtattttcttaggtaacttactctctgttgccttgtgtatccagttacctaaaggctctggaggtcccacttttatctcaaatccagcatgtctaaaactgaacatactgtatttccccctgccctcagatggctcatttcaaggtccccagttgggttaatggtctagttagttctttccctagttttcaaaccttggtgtcttcttgagcactctcctggtgtttagtgttcccaagtctgttaactcttctttctcagggtctgttgagactttccgttcctacccgctaaccattcccctcgtttagcttttagtatttcaggcctagacgctcctgtccccagagcttagatcatcttgagccctgaaattcagcagatcttgctcagtgtgcaaggttcaagtcagttcaccaacttccaatcttggctcctacccagaggaatttttgtcctctgagtgaatatctggtaatcttttaattcatgctgctgtgtattatatataatttaactttaatgtctgtatgtcttggcttctcagttacattgtaaatatgttgttaggaaaaaaattctttcttgatacatgggtcttttatatttcagcttcctgtgtgttgagaatatcacagtctgtatcatgtgagaataatttaagaagtagtataactaaagaacagtgattattttgttttcaacagattgtcagagtccttttttttccatttatttgttgaataattactgtgtacaagatgtgctaggtgtttttgagtggtagcaatgactcaaaacatagatccagtaggaagactagatgcaatgtgtaagtaactatgatatacagtgggaagagttaagtgtcttagagaaaaatgaagttctgtattggccgttgaaccaggctttgaaaatgggagattgggcctggcacagtgggtcatgcctgtaatcccagcactttgggaggccaaggtgggcagatcatttgaggtcaggagttagaaaccagcttggccaacatggcaacaccctgtcactgctaaaaatagaagagattaagtgagtgtggtggcatgcatctgtagtcccagctacttgtgaggctgaggcaggagaattgcttgaacttggggcagggggttggaggggtggaggttgcggttagccgagatcacgccactgtagtccagcctgggcgacacagcaagactcccatctcaaaaaaaaaaaaaaaagaaaaaaaaggatgggagattgttcccttacgatttcgctatgaaaattttcaagcattcagcaaaattggaagaatttctactaccttttctactaatgacatttcattatgcttgcttgatcatatatctgtgtaaatgcacatctttctgtccattagttcatcttattttcaagatatatttttgggatggtggactggcattcataaaggcctgaaaatatgggaagcatcagtttctctgagtgcgaagtcaggagattgagaccatcctggctaacacggtgaaatcccgtctctactaaaaagacagaaaaaaattagccaagtgtggtggcgggtgcctgtagtcacagctactcgggaggctgaggcgggagaatggtgtgaatccaggaggcggagcttacagtgagcctggatcgtgccactgcactccagcctgggcgacagagagagactcggtctcaaaaaaaaaaaaaaatttctcagagtgataggcatgtgaaatacacaaacagtttgaaaagtataggtagaaaggacatattatgaaaataatgctgtgttatggaccaaatttatcaaatgatatctttgtttttgccaaataagaaattatgaaaatatgattacattaaacaattttaaaatgcaactacttaggaacacacttgtgtaaatatggagacctatggaatgcaatttatagccagtgtactgcagttgattttgaaactgacatacggaatttggcaatacatagaacagattatgtaattgacttaatgtgaatagttggcatttacaatgtatttagctttttgcttgatctgttctttaaaattaacttcagtgaggcccagtgtcctggtagcagagtgattcaaagaaagaaagattactattaaattaagtcttgcttttttgaaaaatgagaaattctgaattgaagtcagcaatttcaaaatatacttaaggcaattatgagggaaggttatattggcttgaaaagatacttcaaaatgtaaatgtcagttctaatattgccttagctaaatattagatatccttgatggctttcttattgcaataattatcttcccactaacccaaatgcaagaatgaagattataatgggatatttcaatagatccagaggaggttaaatttggataggccaaatgcaaaactgacaccattacagtccaataggactgaatgtattaactgttaagtgtacttggagtgagtctgactagctcatgttgaaccaaaaggtttatgcagtaaaaatggcattgtggcacatcagaaggcacagttgtagattaaataacactcatcagccatttagaaatggcaagtgttgaggagagctgtccgggcgcggtggctcacacctgtaatcccagcactttgggaggttgaggtgggtagatcactggaagccaggagttggcctggccaatatagtgaaatcccatctctactaaaaatacaaaaaattagccagtggtgatggtgcatgcctgtggtccctgctacttgggagactgaggcacgaaaatgcctcagacctgtgaggtggaggctgtagtgagctgagattatgccacgacactccggcctgagcctgggcgacagcaagactctgccaaaaaaaaaaaaaaaaaaaaagaagtgtagaaaactattttactaatatatttatccctatagaagcagacattttatttaaaaggtacattgctgatgaggggtgggggacagttaaataaatgaaaaagcccactaccgtgaggttttattaaatgtctaagttaccttccacgtggagaaaatagctttcagacgcaccaggatctcacacttgcatgattgttaatgatgtcaggcaaaactagtcaaaaccaactaggaaacaatatggaactggccagtctaatttttttttttttttttttttgagatggggtctaactctgtcaccaagctggagtgcggtggcccaatcttggctcactgcaacctctgcctcccaggttcaagcgattctcctgcctcaccctcccaaatagctgggattacaggcacacctgtaatagtagagaccaccacacctagctaatttttgtatttttagtagggacggggtttcaccatgttggccagactggtctcgaaatcctgacctcaactgatccacccaccttggcctcccaaagtgctgggatcactggcatgagcccccacgccctgccgaccactattgatgtttgtagatccagtgaagttcagaattacagcacatctttggtcttttaatttttgtaagtaaagatattatataaaacatcttcatccttcaacttcattctcatcttggttctaattttgaagggagggttccctgagggttcttatctccctcagggaagggaggtagatcatttctttcaagatagcctatctctgctgaccttaagtcataggagttctttaattcttagagacctctgccttctcagaggccagtaccacctctaaagtgtcgtggccccttggtctacactgcagcacccctcatctgggaagtgctgttatctccagtaagccccactgtattctttatacatctctggccagccacatatagaaatttccaggctgtcaactttttcagtgtgacttggttccagcatcttgtatacagatcttcgagacctaaaaagaaaatcttttttttctgcgttgatgtatttttctccctagatgatgtttgtctttttctttttcttctttttttttttttttgtgacagagtctcgctctgtcgcccaggctggagtgcagtgacaccatctcggttcactgcaacctccgcctccagagttcaagtagttctccgtctcagcctcctgagtagctgggattacaggcggccaccaccacgcctggctaattttttttttttttttttttttttttttttagtatttttagtagagatgaggtttcactgtcttggctaggctggtcttgaactcctgaccttgtgacctgcccacctcagcctcccaaagtgctgagattacaggcatgagccaccgagcctggtcagatgatgtttgtcttaataaagatgtcattcattctttgagcagttccagttacagagctggtcctaatgatataccccatgagcttaacagccctggaacccctacctgtcttatctgataagggcaaaactgtgatgagaaagagggtggaagagagggcttcccttgtatgcttttgttcttttttgtttcattaaagatatttcttggataaacagtttttctcaattgctgttctaacagtctggaaaatataggtcatggttttgtgactctctactcttactatgttagagatatgataaagcatccatgttgagggaaaatatgtgtttctgtttaaaaccgtggtttccccatcttgaaggtgttatagtactgcctttgtaagtactggtgagtacttacaaagtacttactggtgaggggctgggtttttgctcagttaaaaatctgaaagtagccaagtgaacctggcatcaggaaagggagggaacctctgtggttgtattttgtaactgcagtaaaaaagccaatgcgcatgattaatcctcctaagtcttatttgggcctaatgaggaaaggaggaagagggaaaccagtttgcattatgtgggaagataaagatttcttcaatggtttggtattctgaagagttagctgaggccgggaggcactgggctttgtctcctcagtgtttcggccctctcctttcatattggttttccttttttaattaaaaaattagtgcatttcctctgcgggtaccaggctcagaagcctgccatgcaagtggctgagcgaaaacccctctttgagtgaggaatccccagcacagaatgagagggtcttcatcttgcagcagtggcaagggtgagagtgaaaaggcaccctgcattctgtacctgaaaagaaatgcatttagaggctgggcgtggtggctcgtgcctgtaatgtcagcaatttgggaggctgaagcgggtggatcatgaggttaggagttcgagacaagcctggcaacatggtgaaaccctgcctctactaaaaacacaaaaattagccaggcgtggtggtgcgtgtctgtaatcccagctactcgggaggctgaggcaggagaatggcttgaacccaggaggtggaggttacagtgagccgagattgtgccactgcactccagcctgggcgacagagcaatactcttgtcttgaagaaaaaaaaaaagagaaatgcacttagatttcaaatttagtttggaaagagaaattataattgaatcacctaattcccaggcttgtaaatgttgtgtccttcaaagcttgaaagcaaaataaccacataaatatttgggagtggttcatacaagtaaacgtcaaatacttgagacattttggttgcttggaagcaaggtcaaaggaaatggtttgcatatggtttagctagaagctcttattttggcagattcttgaggtagtaacggtcacaatgtggattttattgttctattttgacatgaaaaaggttttttctcttctctaaccttcaggatagagttgcataagtaacatcaagataggcatgttcagtcaccataattttgtatcagagatgatgtgccttcatgagctgtgaggtttaatttgcagaatcatcagtttgggccggcacggtggctcacgcctgtaatcccagtactttgggaggcctaggcgggtggataacctgaggttaggagttcgataccagcctgggccacatggcgaaacctcgtgtttactaaaaatgcaaaaattagccaggcgtgttggcggaccctggggagccagaggttgcagtgagcggagatcttgccgctacactccagcctgggcgacagagactccaactcaaaaaaaaaaaaaaaaaagaatcaccagtttgttacaccagtaggtttcagcctgccatcattcatactatactgtgatttgaatacaggagaaagtgggctctcttgaattacagttacctcatctgtttgcagcagaactctctctctgcagggctacctcctaaacggggagtggggagggaggagaggggaacttgcaaaacttgtaaatatcgattggggttgtttgtgtacttggcaccaagctggttgcattggaaacttttctctctggatgggtaggtatgtaggccatcatgaaatttacatgtggtgaatgggaaagcttcctgtggatcatcctaccctgagagttcttcaatctgtatgactgaattggtctctccccttcaaccttttaggatttaattttctcttcagtggcccattatgacatttacatacgttgaatttgaaagattcccatactcccagtctcttctgttaccggtgtgcctggagcagtttgttgaatttgtgaaattttgagatagaatgaattttgtaggacctgaatttatttataatcttatatttatattataaatatgatgtatatttagatgtatatttatgttataaatataatgtatatttagatgtatatttgtatgtcatgtatttgtattaacatgaagtctttctgatgatgataaaacactatttttaaacatttagcagttgatgactacattttagaggtcatcaaaatgttttattttttcctctcttgaagttatttggtataattaaaaaaattcatactaaggaaatttatcagggttaaagattcctgtaattaggcatgttttgatgttattgatatcctcttttctggttttggagtggatactttccctgctgtgacctctgtgctctgtagtggttctcctagggaattatattccagtaattctgggtatttctttaaggtgctttgtatttcttgaagtgccattttgatactttcagtgttctgaactgtacctagaacgtactttttataaaaaggaagcagagtccatccaggcagagagagtactgtgtgcctgtagtcttgtctattcgcaaggctgaggccagaggatcccttgagcccaggagttcaagtccaggctgggcaacacactgggaccatgtttcttaaaaaaaaacaaaaacaaaaaacaaaaaacaaaaaaccaaaaaaactaggcagtgcgtggtggctcacacctgtaaccccagcactttgggaggctgaggttggcggatcacttgaagtcagcagatcacttgaggttaggagtttgagatcagcctggctaacgtggtgaaacccagtctctactaaaaatacacaaattagctgggcatggtggtgcatgcctgtagtcccagctactcgggaggctgaggcaggacaattgcttgaatccaggaggcagaggttgcagtgagccaagattgcgccactgcactccagcctgggtaacagagtgagactccatctcaaaaaacaacaacaattaacaacaacaaaaaccaaagctaaacaagagcagaatccagattattaaaataacaatttaaaaagcatgattgtcacaggcttcaataattacctgcctgctcttgagtgtttaggttggtcttggaatcggcctgtccctgtgcttgaggagtggaccctcagggtgtcactgcccttctttgtgatctctttttagcctactgtccttcctttggtgcctaactcagaaataaacattcttaatctgttcagcttaattgagattcaaacctcttaaaaagtagttttgtcaagaggcgtgtgaaccagagcaactccattttgaataggagctgggtaaaatgaggctgagacctactgggctgcattcccagacggttaaggcattctaactcactggatgagatagttggtcagcacaagatacaggtcataaagaccttgctggtaaaacaggttgcagtaaagaagccagctaaaacccaccaaaacaaagatggccacgagagtgacctctggttgttctcactgccacactcccacaagccccatgacagtttacaagtgctgtggcaaagtcaggaagttactctatatatatagtctaaaaaggggaggcatgaataatccacccctcgtttagcatatcatcaagaaatagccataaaaatgggcaatcagcagcccttgggctgctttgtctacggagtagccattcttttattactttactttcctaataaacttgctttcactttactctagggactcgtccagaattcttccttgtgggagatccaagaactgtcatttgaggtctggattgggacccctttcctgtaatagtttgaatgttaaagtttgtgccattgcattctttggtgtgattgctttattctgaactagaggtgaagaatgtggggaatgtggaataaaatgaagggaatatatcagtacagatggagctcataatttatggtgaatttctcattcctcacaattggagggtatatgtttgaagtgagtcaatttctgaatttattacctaatttgattgtatgccttatacattatatttttaagaaaaaaattaaaataattattgtgctctgtgatctcattgaacgatgtaaatgatcttgggtcatgtaaaatgctgaacatataggaggaccctacttaataatttcctttgcgatgaaaatagggacacattttaatcaaagacaaactgttgatggttatgtttcttagactaaccatgacttccgcctgtgtttatggcaagaagggaaaaggaaaacactttcatccacagaagtcatcaattctgtcatgattgacaacttgggggcctccaattaagcctcatttatactccccaccccccatttttttagagaattgattttaaagggtattgggaggaagaagtaattaagtcagagagataaaatgagaacttaaaacacttcagattgtagagtaatgcatcagagggattcttttcaagacagaattgtctgtgatccttaactgtgtgaatacactccttggatttgaaatgaagacaacccctttccacttagtcatgtgccctatgaggcttgtttctgtgtggcttgctgagactcacttaaaatgacattgacttttattaaaccttaaggtttgtgatgggctttttgcacaaaagcctacttctccaggggacgtccctgctctctcaggttgctatcttgttactctggcctgaaacaagttagcagccactttcccgcagacctgcacaaggcacatcacatcaacggctgttgattagagcataatgacttgttagatcatgtttattgtgcaaatgaacctgaatgttactaggacagcatatccatgtaggcttagaaaacttaatttttaatgccccttctatctttcatcaggctaaagcttttggatttatggttattcattctagctataaatatattaatagtattttgggctggtcagatatggggcatgacctttgacatcctgcttggctatgcctgggaatttgacatccttcaatttaggtggaattcccttgttttgtttcctgtgatagtgtggggaaatacacattttggctccttcggcagaggaagacaggaaaaaagtaaaattggaatgcactaagaaagtattaatgattttatttctgctgtgtatagttgaatgcacatgctttttatggaagcctgagcctatgaaaatagtgcacaataataagaaaatgctaacaatcatatttagtttttgcattttttaatttggatttattttttgactagtttgacatttttgggtttttgaactgttttgcatctaagtatacatggtggaaagaactttttgtgatgcctttactagtattatcagtacagagtatcaacagttgggaagagctacaaaagggaactcttagccggtgtgtattttgacctgaggaagggagtgttctgttgctaccaactaaaagtttatgagtgtgcttctgtttcctgaatgtaatcagcacctccatcaataattatccctgtaggggaacacaatatggctttcctctactgtaggttctttgactgagccaataattaaattgacataaggcagactaacaagataaaaaaaaaattgtattttcttatgcactggtgactcgaagaagagtcagatgattgaaacttatagagcatcctcagctataagttaatggggattatacagataaaggggaaaagacaaagagactcttaccactcttgctttgaccagactctgcaggcatagatgtgggagcccaatgtggtaaaaagtcttagctacagctggcgttttgtcagggtctcaggatcctgcagctggaacagtcctggagctagtagtgttccagccagtgaaggatgctccacattgggcaccagaagctatatagcagggaaaaatggcttccccccatccttctaggttctttgggctgggccatgatttaaattgacactagatagctgggcgcggtggctcatgcctgtgatcctagcactctgggacgctgaggctggtggctcacttgagctcaggagttggagtgcagcctgaccaacatggtgaaactccatctccactaaaaatacaaaaactagccagatgtggtggtgcacggctgtaatcccagctatttgggaggctaaggcatgagaattgcttgaacccaggaagtggaggctgcagtgagctgagatcacgccactgcactcccgcctaggtgacagagcaagattccatctctgggcaggggaggggaagaaataaataaattgacacatggtagactctaacaggagaaaatgtcattttatttatacttatgtttgcacaagagtcccacaaaatgtaatgcaggttgcatgattgaagcttatattgtatactgagctaagaaaagaattagggtttgaggtttttggtggggtggtggccacacaagttaaaggaggatgaggggaagaattatatggtgaataaagattgtcttgctcttggggataaagtctctcaggtaataaaagttgtctggagcagtcctaatcctagtacagatactttactaatgtagacttcctttatggatgcaaatttcttttacaaaaggacagcttttcttgtctactctggtgtctgcagtttcacagaataaccagctcaaaatatgccaaggaagtatattttggggtggcatattctgatctcctacagtcatattttggggtagtgtgtcctgggccccaacatcccttttgaattgttacgaagttcaggccgggcgcggtggctcacgcctgtaatcccagcattttgggaggctgaggcaggtggatcacttgaggtcaggagatcgagaccaccctggccgacatggtgaaaccctgtctttactaaaatacaaaaaattagctgggcgtggtggcacatgtctgtaatcccggctacttgggaggctgaagcaggggaatctcattaacccgggaggcggtggttgtagtgagctgagattgcgccactgcactccaccctggagacagagccagactccgtctcaaaacaaaacgaaacaaaacaaaaatgaattgttatgaagttcaaatgtccaaaattcgatgaagcggagggaaattggttaagctagaattttataatattcaccttttagaagtcacagtagttggctgggcgcagctcacggcaccaacacttgtaatcccagcactttgggaggctgaggtgggcagatcacaaagtcaggagtttgagaccagcctggccaatatggtgaaaccccatctctagtaaaaatacaaaaattagcactccagcctggatgacagagcgagactccatctcaaaaaaaaaaaaaaaaaggtcacagaagtcaacttttgctttaaaaaagaaaaccacaattccttcacacccctcaaataatcaattaataggcttgctttttgttcattaatttttttatttcccatctaaggctgatatccatcatagactaattaaaattgtagattgtggggagtctatctgttctgttctcaattattcactaaatggagagtgccatgacttttttttttttttttgagacggagtttccctcttgttgcccaggctagagtgcagtggcgtgatctaggctcatcacaacctctgcctcttgggttcaagcaattctcctgcctcagcctcaccggagtagctgggattacagcaagcgccaccatgcccggctagttttgtatttttagtagagacaggatttctccatgtttgtcaggctggtctcaaactccagctgccttggcctcccaaagtgctgggattacaggtgtcagccactgcacccggccagtgccatgacttttgagggtgcacatctaaatggctgatattaaaaatgagtactttttgatcacttcctactccccttccctagtttttcatctcttctttgctttccttctcattttcggccccctcatttaaaatatttgacttgaataaatttctctaactttaattagatgaaaagtttctttaaaggtcattgctggttgctggtgtgagttttaagtttgctacaacaaccctgttttacttattactgcctttagaaatagtcattgttattaatagaactgatcccatttagaaatatttgcaggtggtgatgatacacttcaccctgggcgtgaacatgatgcaagtcaccttaaggcctgtaaagaggaaatccacaaggagaatgacttaggggagtgagctaaatggaagttacctctgtgtactttcaccttttaaactgaaaatatgtaagtatgtgtttgtcttaccatagttttactaccttcatagtgttctggtaaataggacctttaaaatgagcagggaaggggagggaaacagtttttctggcagctgatagtctggatatatagatgtaaatttccactgaaactgcacctacccaatccttttcctactgtgacatgtcattaactcatatttgacttttgggaggagagaactacaaactcatgcagaaataccaaggtgtgaggtaagaagtcatagccatttcagtattctagatgtgcatgtcaccagctgttgtcattgagctaaatgcctttgtgttttcagtgttgtctcgactctgtcgccagcagtagtctggtttagtctggtttagcaaattctgcagccttcctgcctcatctgtgttgaatgctaagattagtaactttgagatgagtagtgttggctgccttcacattctgaagttcttaattttaacttctggcttagagaatatgagaccatggactggatggagaagtctcttaacattagtaaaaggagttaaattctcagggtggtttcgcttttgtgcttgaatgaggatgggagagaatactgccattctctgtgttttgggtgaataatcccaaagacattttatatgttgagagtttagaggtttgacccaatcaaaccgggaattgtataactgggatgtccaataccaaggcctctaagctcctgaaaaacactttagaagttcctgagccatcattgtatgtgtgacctggtatatcccaccggactcacgtgcaggtcttaacattgtgattttttttctctggctctggttagatttggcttttactctatctctggcttctaatcggtcctcctttcattctcccaccctacttttctctcctagtaaatttttcctttctgttagaggcagtaaagtcctcactctccttgtcagtccacatggaagctttgcctacttggctccccttggggtgcggtgaggtgagaggaggagtctagtcctgtgctaatcgcagattgttggggacatgtgtttcaatttcctttgtctcagttttcccacctgtaattttggagcatgataatgggccatccagtgctagtgtctgcaaaacttgcttcgagatcactggacaaaaggtgctggttagatatatttactggcatgccctgggaggatgtctttagatcactacagtattccaaaactcacgttggggtcacgtcagaatgatcagaattccctctagcatttgctctttataatgcactcatgagcctaacttagatctgtaattttgcagtaaatattaggagtttttggttctgtttctgcattggtaaccagataattcctatttagacaagtcacatcactgcggtactagcatcgtcatctgtaaaatggggataatgatactgctgggaagtacttgtaggacaagttgaggtgctcaaaggaaggagctgtgtaattatgctgtattatacagcaatagcattagccaaaatacttggacttaaagcttagcacacctgagattctggggttttctttttcttttttttttaaattacggacattaggattatatggaatatttttacataaaaacataagatcagaaccaaagaaagaatcaaaacctttagacctatctttcctagcattcctagtaattgtgtagcaagtttgataagggtgctctggcagacttatattgtttttgtgctttggaagaacttctgatgggatggggaaataacctggcagcatgagaaagtggaatataaaattgtatatcaactgatttcaattatgtgaagtatcttaggctctactgtatagctgtactcgggaggaaatacacccagagtttgcagtgggttgtatttggagtgtataaatacgggtaagttatacatatgtatcttcttttcttttttttttttttttctttttgagacggagtctcactttgtcacccaggctggagtacagtggagcgatcttgactcactgcatcatctgcctcccgggttcaagcaattctcccacctcagtgtcctgagtagctgggattacaggtgcctgccatcacacctggctaatttttgtatttttagtagagacggggtttcaccatgttggccaggctggtctcaaactcctgacctcaaatgatccacctgctttggcctcccaaagtgctaggattataggcatgagccaccacgcccggtcctgtattacattttaagtaacaaacacttttaatagaaacattaacaattttgaaatgaaaatgctgtttgtggttttcaggctctcctccttgagagaattttggattcaagcaagtcaaacttgagattatttgtattttttatttttgggagaggatctcactctgtctcatccaggttgaagtgtagtggcacagtctcggcttcaccttctaggctcaagcagtcctcccacttcagcctctgaagtagctcggacacaggtgcacgccaccatggtagactacttttttgtatttttggtagagacggtgttttgccatgttgcccaggctggtttcgaactcctgagctcaggcaatctacctgccttggccttccagagtcctgggattacaggcatgagccaccctgcccagcctatttatgctgttaaagggaagaacagagggctggaattaaactttagagggtcttttatgggataggcagtgagacaggactgagctgatcatgttaggattccaaagggtaagtttgccaagcttatatctgtcatctgatagtctggatgtatagatgtaaatttccactgaaactgaaatttacatttatatgtggtgacaggcatgagagatacctttttggagtatagttgccggtgcaaaagtgaagacagactgattgagggaagtacactggttgagggaatgcccattttttgagaggacattcgctgactgtatgtctagattggggtttggttgcatctgctacatatcctagcacttcttaagaatgtgaaaaaaatctatagaattagacctgtttttcaaagcagtgaagttacactagctacaaaaaagaagctgatatttattgtgtgcttactgtggcaggcactgctataaatgccttttattttagtctcataaacatataatgtagatattcccactatccccaatttgtatatgaggaaactgagacacgaagttgagtaatttcttgaatgttacacagtaaatggactcaagatgccaatgtgtatttatttatttatttattttttgagatggagtattgctgtgtctcccaggctggagtgcaatggtgtgatcttggttcactgcaacctctgcctcctaggttcaagtggtcctctcacctcagcctcccaagtagctgggattacaagtatgcgccaccatgccctgctaatttttacatttttagtggagatagggttttaccatgttggccaggctggtcttgaactcctgacctcaagtgatctgcctgcttcggcctcccaaagttgctgggattacaggtgtgagccaccgcacccagctgtcagtgggtttttaacctaggtctgtgactcttaatcacttcagtttgctacagcaaagagaataattatctttggaattttggagaaaaaaactaggacttaaatttgaaactggaaatactaaagtaaaataaaattaacggctaaataatcagttaattaacagaatctaaacaattaatgcacatactgacaatcctatggtagaagtcttactggctcatccagctagttaactagactcttaaagatgaaaaatatataatgatatatatatatatgatatatataatgagatataatgagatttatgtcaaagtattagtgaattgttctctaaggagaataattcaggtgtgtttgtggtgatgattaatgagcggttgggaggagttgaccaagtaaccctgtcgtggctcagggtgtggtgaagaggagttgcctgtggtttcctcaccagatggataggaaggctctatttagttggcttcactgttggctctgtcaccccctacacatactgcctagaagacggaggaaaagaacctccttttacggggaatggaaacttgtccttgttgttgctgtggggttggcacatagaaataacaaacactggccgggcacgatggctcacgcctgtaatcctagcactttggagggccaaggcgggtggatcacttgaggtcaagagtttgagaccagcctggccaacatggtgaaatcttgtctctactaaaaatacaaaaatcagccgggtatggtggcaggtgcctgtaatcgcagctacttgggaggctgaggcaggagaatggcttgaacccaggaggcagaggttgcagtaagccgagattgtgccattgcactccagcctgggaaacagagcaaaaactctgtctcaaacaacaacaacaacaacaacaacaacaacaacaacaacaaaagaaataacaaacactgacctgtttggacagaaaatactttgttcttggggtgagcttaagcttcaggaaggctactgatactttagttaagggacgaggacaaaaagaaatccttaagctttcatccacattttactaagaacaggtcagtccttcccattaggtactgtctctattgcatgcacaggaaactgaggtgaagagaagcgaagtgacctgctccagactgaggtcctgagactcagggcttgggggatgctaaagccgcccttctaactggatcatcagatgagcagaatagcgcccaggagcgccctcattgagaaagtcttttggttttgctttggacgatacttagagagagagagtgtagtgtagttcagaggcagtggtaaccagggctaccttcagagccagacattgcttggcttaggactctgcttccaaataatgttcatcgtccctccctttccctttccttatcctttaaaagaaatcacagtgacctaaagcaattcttttaattccctttacatatgatgcttgcatgaagtgtgtggccctttagctttttcttgagtaattggttcctaatagatggacaggatttgtgctattttagtgtaggattatctagagtttttaatgtttgttttattcaaggagtggaatctatggccctgtgggggcagaggttctgtagtgtttagaaccttgagtattgtcacaaatccgttcaagcttgtttaacttaaccttggacaaattaacatttaaggataggttttctcacatgtataatgaggatagcacttgctaagattgtcgtgaggattgagggattgggtttgccacataaggcaaaggttgctctctcccgttctcagtcgttttattttcgaagatttttcagatagaagggagaaaggaaaaaacttctaattaggtctaaattcttcctctgctaaagactgggctagtggttctcagctggtccctctgacatttggcaattcaagaaacatcttttgttgtcacagcttgggtggggatgtgttgctactggcatctagtgattagagatcaggggtgctgctaaacaccgtgcaaagcacaggaccgacctcccataacagagaattatctgaccagtagtgctggccactatgtgtgtcagtagtgctgaagttgtgaaaccctccctgctctagacaaaattagtttatttttttcctgcatgaaaatgcctttgttgcttagtgagtgattttgaactattggaataaaaaactgagagaattcctaacttagttactagtgtttttatttactgcacctaaaactagaagaatgacgtgtagggctctggactactgacaggcgaccctgtggtagggccaagcagggttagactgtcagagggtctgacctcctattccatcagccctgaggcttgtgacctctgaagagatgagtcactctgctggctcttgaaccttctccatatccctgcttcccttttcattgtcttagtaactgttgttgtttttttttttaaagacagagtttccctcttgttgcccaggctggagtgcagtggcactatctgatctcagctcactgcaaccccctgctcccgggttcaagcgattctcctgcctcagcctcccaagtagctgggattacaggcacgcaccaccacacctggctaatttttgtatttttagtagagacggggttttaccatgttggtcaggctggtctcgaactcctgacgtcaggtgatccacccgcattggcctcccaaagtgcttggattataggcgtgagccaccgtgcctggccttagtgactgttctggagttacagaggtggtgcgctgccctgccccccttccttccatttcagaacttccagtgatggtctgaagtttctactgccttcagtgcctcatcacagtatgaatacagtgcccatccttctgatgaccacttctcaccactgtcgtgagtgggcatgtattttcctaggaccattgccaccttctgaaaccttaggccccctcctcctcctcccagactgcctattttgctgccttttttgtgaagcttgttgtcttgatttcctccccaattgaatgggatttctctgtttcctttgattccccccttaacaggtgtgctctctcttggaactttttgtgagttagtctctcgcccccaaatctcattggactgtaagcttttaagggcagaattctatttacttttcctttctggtcccaggaaacatcttaatatttagtttctcacacacaatgggaatgaaacagacatttaaaaatgacaaattttagcttttttttttgttggagaagcaaaaatgtattctttcatataatgtcttccttacatcacttcaacgttcctctataagttatctccttatggtgatgatggtgatgccagaggttctcatctggcttgacatgtttttctagtgcatccttttaaattactaggtccttaaattaaatgatctggttcactgctgtcattgtactaaactgaccctaaaccaatccttgctgttcctaaatttagaaacagaaagaaccttcacagcattccagcctttctgccactgaagtctactgacagaaaaaccaaatttcaagaattttttaaaatacaaaaacttttaagtgggtagacatatcactgttaactcagtagtggactgttggcagtaaaatgtgtactacagcttgcaaatgaccctaagtgtggtgcctccagtatcttagtctcatctgtaatacagataaacatgaactttttctgcagttctgtatagtattgcttatctaaataaccagttattcccataaagtgagtagttgctgaggaagtcagtatagtagagtgcgtaagtgcttcggtttgccggtcacactgcctgggtggagttctgccttcagtgcttaccaactttatcacttgggcagttgacctcctgtgctgctctttactcgtgtgaagaatgtaaatagtaactcttataggttgttgtgagaattgaacaaaacataaaatgtgttctagagtagcgtttgctgtgtaggaagtgttttataaatggtagctattattatcattactttggtgaagtacagattatatatagaaagcagaaaatagaaggctgacattttttgagttggttaaaatttgatagctaggaagacgtaaggttgagggtgaaatcccagcaggacctattgtaacctttttttttttttttttttttttttgtgatggagtctcactctgttgcccaggctggagtgcagtggcacgatcttggctcactgcaacctccgcctcccgggttcaagctattctcctgcctcagcctcctgagtagctgggactacaggcacgtgtcaccatgcccggctaattttttgtatttttagtagagacggggtttcaccgtgttagccaggatggcctcaatctcctgacctcctgatccgcctgccttggcactcccaaagtgctgagattacagacgtgagccaccgcgctcggccataagctttttacatgggatcaattgccactgccaccagaaaggctgtcacagtgttgagttggggtatctttctgtcaagtttgaatccaaccttcctccacttgtgaatgaagttcttaatcttcatgcctcagtttcctcatttgtaagttggtgcaataatgatcaagggttgttatgagagctacataaattaataatacatggtaaggtgcctaaagaacagtacctagcgcatagtattcaggaaaagtcactgtttataattacagtagtttattcagcctagcacttgtactccaccaggtattgtgctaggcttcttgttatttccttcttttaaaacaatattattattattttttggccaggtgtggtggctcacgcctgtaatcccagcactttgggagtccaaggcgggtgaatcacctgaggtcaggagtttgagaccagctactaaaaatacaaaagtcagctgggtgtggtggtgcatgcctgtaatctcagctacttgggaggctgagacgggagaatcatttgaacccaggaggtggaggttgcagtgagctgggattgtgccactgcactccagcctgggcaacaaagagtgaaactctgtctcaaaaaaaaaaaaaaaaaaaagtttttgaaaaatagaaatgggatcttgctatatcgaccaggctggtattgaactcctggcctcaagcagtcctctcatattggcctcccagagtgctgagattacaggcatgagccactgggcccagcccattattttattcttacagtagcctttcatggtgtaagtatcatcaacattttacaggtcaggaaatggagacccagagaggtagaggaccctaccttgtttgaggttgtacagcttgtgtggcaaatgtttaacagaccccaccattttgttttttgttttttgttttttttttgatggaatctcgctctgtggcccaggttggagtagggtggtgagatctgagttcactgcaacctccgcctcccaggttcaagcgattctcctgcctccgcctcccaagtagttgggactacaggtgtaccgcaccatgccacgcctggctaatatttgtatttttagtacagacagggtttcatcatgttggccaggctagtttcgaactcccgacctcaggtgatccgcctgcctcagcctcccaaagggctgggattacagggtgagccacagtgctggctcccactggtttttacagatgggcgccactgtgggtctgtcacatgcatgcatctggtccccagggaggggcagcaggtagagtacagctcatcctgatggctgggacctctgtcacgtccccagaagtgggcagggcaggccctcagtggaggggagaggactcactctcctcagtggtgtgcctgaccatccagaggcctttcctgcacaaggcatcagccttattgactgtagagggcagtgattagaggtgagaaatttagcttaagggattgcccagacatgacatctcaattttcctctgtaaaaatactcttccagactcgtggtaatgaaaatattttcattgtagtcttagcaggttatttgtttgacaagcagattataaagctgagtaaaagcaaaactgaccaggatgatgatattttgaaaactgactcagtgatgtaaacagtgcttctacctggtccccatggatgcagtattaaactggaaattaagtccttaaaagtccttaaccttcgtgggttaaagtgttctttatcaggaacagtttttttttcccctaaatgttaagcttgtaatgattctgtgatgctgcagaattacagcattacttgtagacttagtagcatatagcaaaaaatttatcttaaatttactcctgtgtttcttcgtaggaggaataaacagtgaatgggaaccagtatttttcaaaaatttttttggttaatgaagaactaggtattacgatttctttgtctgatatctaatactttgtttcaggcaataaagaacaatgccatatgccttaccaggtagatttttatataaatgattgcttatgaattgtaaatgatatgagttgggtttagaggtttagattttaatgaatgatgctaaattgatgttgaaattgtagagggttgtttgttttgtttttaaaaattggggctggacacggtggctcatgtctgtaatcccagcactttgggaggctgaggtgggtggatccatgaggtcaggagttcgagaccagcctggccaacatggtgaaaccctatctctactaaaaatacaaaaattagctgggcggggtggtgggcacctgtaatcccagctactcggggctgaggaaggagaattgcttgagcccaggaggtggaggttgcagtaagctgagattgcgccactgcgctccagcctgggcgacagagcaagactccgtctaaaaaaaaaaaaaaagtactaaagccacctttgttgctttctttttttgttgttgtcgagacagggtcttgccctgctgcccaggctggaatgcagtggcatgatgatggctcactacagccttggcctcccaggctgaagtgattgccctgccttaagcctcccaggtgcttatttttaaattttttttgtagaaatggggtctgtgttgccctagctcacttttcttactaatacacttggagtgacttaaattgtgtgtattctgcagcttcttaggtttgtgtttagtttattgaatgtgggagtgttcatttgttaatgcctaagtgagatttgatactgtctatacagcaaggtgtaataattacattttcttgtatgcagttgtgtggatatgaaccagttaaattgttgagttctctattgcagattagtccaacacaaagcaaggctttttggtatcattgggaaaaactaaagggaatttgtcgtgggcagttttattagcaaagggaaacttctttacattttactgtaaaatcacacagtcctggtaccctgtcatatacctgtcatgtgggctaacagtttgatgttgaagaactgttgtcagttactagattgtaaagtgcctcatccagagaataggtatgaaacttcccataattcagtttccaaccctgatagtgagtgctttactaggtacagtaattcataagtttattttgatgaacctgggtgcttggcaaaataggaatagcatgcatttctactgatgtgtgcctttggtgaggaaagttgagtttctatacttgagcataaggagtcttgggaattctttccttggccatttataaagttactgtgactatgtatcttttagtatgaaatggataaagaaatctacattctatttttaataatagctttattgagatctaattcacataacagtttacccacttaaagagtacaattcaatagtttttagtgtatttgcaagagtttgggcaactatcaccacaattttcatttttatcatccctaaagaaatctactaccagtcactccccattcttcccatatctccctaacctgcatttactctctgtgtttatggatttgcctgttgtgaacattttgtataaatggtatcattttacaatatgtgatctcctttgactggcttctttgacttagcataacattttcgaggtttattcccgtggtagcatgtatcagtatcattcctttttattaccaattaatatgccattgtatggaaatagtatattttatccatttatcagttgattttaaataatttcaaaacctccccacatttcaaaattattgctgttattaataatgttttgattattcatgtatagtttttttatgtgcatatatgtatgtttcatttctcttggtttgggtatatacctaggaatgaaatggcttgggccataagaactgtttgttcgaccttttgaggaactgtcaaactgctgaaaagtggctgcaccattttacattcctaccatgaaaggtatgagtattctcatctctctacaaccttgatgacacttgttattgtcttgtttattttagccgttctagtgggtgtgaagtggtatcactgtaattttgttttccatttttctgatgctaaataatgttaagcatctttttatatgcttattggctatttgtatatcttctttggagagatatctactcagatccttcgccctttttttttcttttcctttttttttttttttgagatggagtttcactcttttgcaatggcacaacttcagctcggattcaagtgattctcctgcctcagcctcccaagtagctgggattacaggcatgcaccactatgcccagctaatttttttttatttttagtagagacagggtttcaccatgttggccaggctggtcttgaactcctgacatcaggtagtctgcctgcctcagcctcccaaagtgctgggattacaggcatgagccactgtgcccggctctttttttttcttttctttttttgaaatggagtcttgctctgtcgctcaggctgtagtacaatggcactatctcagctcactgcaacctccgcctcccgggctcaagagatattcgtgcctcagcctcccaagtagctaggattacgggtgcccaccaccacccctggctaatttttgtgtttttagtggagatggggttttgccatgttgtccaggctggtctcgaactccggggctcaagtggtccctttgcccattgttaaattgtgttatttgtccttttagtactgagttttaagaattcttcatatattctaggtactaatcccttatatatatgatttacaaataattgctcccattctgtggggtttttgtgttttgtttttgagacggagtctcgctgtgtcacccaggctggagtgcagtggcgtgatactggctcactgctacctctgcctcccaggttcaagctattctcctgtctcagcctcctgagtagctgggactacaggcatgtgccaccacacctggctaattttttgtatttttagtagagatggggtttcactgtgttagccaggatggtctccatctcctgacctcgtgatccacctgccatggcctcccaaagtgctgggattacagtcatgagccaccatgccctgctgggttttttcattttttttggaggtagtgtcctatttttttaaaatttgtggtaaaatatacataaaatacactatcttaaccgttttaaaacgtactgttccgtgacattaagtactttcattttgttatgccaacccattgtaatcaccatccatcttcagaactcttttcatcttgcaaaactgtaactttgtgtctgttaaacaataacttcgcatttcctccttcttcaggcttttgacagccaccattctactttctgtctctatgaatttgactactttaggtcctttataggagtggaatcctattttgtgactggtttatttcacttagcacaatgtcttcaaggtccatccatgttgtaacttgtgtcctactctattctatgtatatatcacattttgtttatccattcatccctcaatggacaccttttgggtgttgtgaatagtactgctgtgaatatggatgtacaaacggtggtgtcctttgaagcaaaaatgttcttaattttgatgaagtccaaagtatctatttttttttcttttgtagcttgtgcttttggtgtcatgtctaagaaaccattgcctaatccaagatcggaaagatttatccctatgttttcttctaagagtttaatgtattagttcttacatttaggtctttgattcttttgagttgattttggtatatgccatgaggtcacagtcatagtttatggaatgcggccctaaacttaagctctagttgttggtctgctttggttatgctgaaaagttgcagcataaatacttttcgcagggatccctcctccacaatgctgccactccaccctgcaggactctaagtccagcctctcttggccctgaatgattgagaactctggaacaaagaccttggcaataatgtttttatatccatttcatttttcctcattggtcataacggctttattctttctcacttatccaccccacaacataatttatgttaggtggaaaattgcccctaactttagtaagcctctttggggtgggaaaatcctcacctgtatggaggcattgccccttgattcttggtttctgaaccacattcctgcagagtggtgccctgcgggaatcttggtattatactttaaggcaacttccttcccatttaagaaattaaaaagatttagacaaagaaaaatgacagagtggtgttgaggagtggtgttggcaaagcttgtagtcttcacagtatgggaagggaaaaatagttttaggctctttccctatttgccaggccagtcattaagtgacaagcttttcctggtttttccttttttttttttgagaagttttgctcccacgcccagtctggagtgcagtggcgcgatctcggcccaccccaacctccacctcttgggttcaagcaattatcctgcctcagccttccgagtagctgggattacaggcgcgcgccactgcacctggctacatttttgtatttttagtggacacggggtttcaccatgttggccaggctggtcttcaactcctgacctcaggtaatctgccaccttggcctcccagcatgctaggattacaggcgtgagctactgcaccaggctggtttttccatgttgacaaatgatttttgcttttcagtgggaacaaaaagaagaacaaaagcaaacagccccagactgtttagaaggatccccttggcttgccctgtgtgtaaacgacaccgagattttctgtataatcagagattctcaagagtttcagttccccttgctgtttaaattagcaggacttgaattcctagaacaaatatgcctagcattgtggcaggactggagttcctggtttagctacttatattttaaacctccttcccttattttttggacatagaaaggtagaagatataatactatcaatttttttgaagtggtgggcattattttgtaaattaaaaatgttagatgtaatgtagttaaaggttcttatcacttgactgctgagcacaagaaaagcccaaaccaggctacttgttgtaggtcctctggtttcagaatgatttatgctcactttactagcacatatttagttgccttgaaccttctcaactgtagcttcctcttacagaacacagtgccccacaaggagactttgaatctgtgatctcctcccaggttttagccgaagcccacaacccactgagcatgtgaagcaagggccattggtggatgggtcttatgtccatatgcaggttgaatattcctaatctgaaaatctaaaatcctaaatgctccaaaatctgaaacttcttgagtggcaacatgatgctcaaaggaaatgctcagtggagggttttggatttttggattagggatgcttaactggtaagtttaatgcaaatgttccaaaatctgaaaaaatccaaagtccaaaatgcttctggttccaatcattttggataagggatagtcagtctgcacttgatatacctctagaggctgtgaaatcttaggcagttcaaaagtcatgttgtttggctgggtgcagtggctcacgcctgtaatcccagcaccttgggaggccgaggcgggcagatcacctgaggttgggagttcgagaccagcctgaccaacatggagaaaccccatctctactaaaaatacaaaattagctgggcgtggtggcgcatgcctgtaatcccagctactcgggaggctgaggcaggagaatagcttgaacccgggaggcggaggttgcagtgggccgagattgcaccactgcactccagcctgggcaacaagagtgaaactctgtctgaaaaaaaaaaaaaaagtcatgttgttttaactattcattgccatttgttggttgggcctcttcaaccattgtgatccaatcctagttcaatcccttgttgaattcaagtattgaggtcttaggatgaatgaacaaggctttgggctggcacataaaggtgggacacccacaggtcctgctctttgggagtttgggtaagtgtattttattcccgagatgcacttgtaaaaatatacatggtaggccataggtggtctcacagtttgtctgtagtagtacagttactgtttgattcaggggagtgagaggtgagtctgtttcagagcaggtgcctgggggacaacctggagaggaaggttgagcctgcagggctttggatgtgtgaaggtaatgattcccagtagtgttttgtattatttcaaagtacttctataccattgttacctcccaccaggtctcatctgcttctgtcagtaggttggccatgtccccatttcacagatgaggaaacttggctttgagagtgtggcttggtgcaactgagatttgggtctagatcgtatgagtcgattccactatacattttctaggaagtggtagtagcgtgaacaaaaaagctgaagaggacggactcaggtagcatggtgagttctttgggactggggaggggaagggtgaaaagtgcagaaagggatgagggggttgtacagtgacaaggtttgtccagacaagttgcgagagtgcccgggaagactgaaaccctcacggggtgtgtgtgtgtgtgtgtgtgtgtgtgtgtgtgtaaacagctcttttgaggaatagctgatgtataatctgcacatatttagaatgtacagtttggtaagttttgacatgggtatgcttgtgaaacatcaccacgctcgagaacgaacattattcatcaccctgaaaagtttactcctgcccccaagaagggctttttaaaaaaaattttttattttgaaattttttcaagtggtaagtttgaagaataaaaaaaaacttttatgtacccgttacccagattcaccagtttttgacattttgataatttgcttgcatcctttatgtatgtatatatgtatacatgtgtatatgtctgtatttgtaggtacatagatttgtgcacacacacacggttcccctgccaacccagtcaagggtagcttttatgagtgatgctgctgtattccttaatgcttcaatgtgtatttccagagaacaagaatagtctattatggatctgtagtacagcattcacattcaggaaagttactgttgtttgtttgtttttttttttttttagccggagtatcactctgttgcccaggctggagtgcaatggcgcgatcttggctcactgcaacctctgcctcccgggttcaagcgattctcctgtctcagcttcccgagtagctgggattacagacgcctgccaccatgcctggctaattttggtgtttttagtagagatggggtttcaccatgctggccaggctggtctcgaactcccgacctcagatgacctgcccaccttggcttcccaaagtgctgggattacaggcatgagccaccacgcttggccaggaaagttattgttaatacagtattttttatttcatgttccagttttgtcagtctcctaataatctccttagtagcaaggacatttttctcctcatacagaatccagtacagggttatacagtgcatttgagcattacctttcttgagttacctttgctttgaacatttcctcagcatttctcagtctttcatgccattgacaccttggaagaagccagaccaactatttttaaagtgtccaagggttttgaggttttagcaggtgtgtgaatgtgatctatctgggtttgggaaaaatgaacagttgtgagtgaggtggatacaggtggtggggaggaagttggaggcagtggactttgtgctctgattcccacaggcttaggttggtggaagccgtggttgggggaattgttggtaaaattgcttggatagggatggacctggaaaagaagcaaaggtgattgcagtgttctaatgcttgtgttctggaaaattaaataaagagcagggaggtttaaagataaaactgggaaagggctgttgtatgtccaggaattgttatgcatacatttcttctttctgcacactgtgatagccctgatggtaactacttagaaaaaggttgtgaaattttaggagtttgggacccagtggccagactgaaattcagtgcatgtagggcagttgccaataaagtcacccttgggtacttgttcatagctttagatggaggaatgtttgttctctagctttaaggaattgagactggtatcatcggggcagtgtctgatggacctagtttagggaagttcatgggccagtgtctttgcaagtgaaactaggcatctttccccaatgagagagcatatggagacgttcactttaaggacgggttttgaaaggggaggtattggtggaacttaccaactttgttatgtagcctagttatcatttctgtaggtgtgtaacagtttatcaagtgcaaggagttacctctgaatcttctatataggaaagaaaatttaggcatgtttagtaacatgcagtaacctctggaatgcaaaaatgcatctatactttcttttatgaagtctgactagagaacatttcagtgtggggcatgagctgtctcaccagcaggacagctttagaggtcattaggctttcagtgttgtaaactgtttatcacttattttaaaacatcacaactgcctgagaccagtgccttacttggttgctttgtcaggagacttgtgaatattgaatccttttaagcttttacaatgttttgagaagtggaattagttaaaaatatatcctcttatcagaatgtctgctggctaggatttgttattctgttgttctatttaaatagaatatgtcatatattagatgttttcttaaatagccttaggttttaaataaaaagtaaggctgggcatggtggttcacacctgtaatcccagcactttgggaggctgaggtgggaggttggcttgatccaggagttcatgaccagcctgggcaacatagcaagaccttgactcaaaaaataaataaaataagataaaataaaatgtagtgaagacaaagatgactttatcctggtccctggtcagggacctggttcataatttaaaactcttttgtttgaatttaagaatctataaagtaggattgataaactatactgccttggattgcttttgaaaatgtgtgtgccaaggcctgctttcacatggtaagaggaaagtcattacctatcatatgccatgttttcctctgacttatacctaaaatattttagagtgcttattgccttatgtaaaattacaagatcatataatcacattcccaccctgtggaaaattaaactttttttttttttttaaagtgaaagcaagtttattaaaataaaggaataaagaatgactactccaaaggcagagcagcctagactctctttgtaattgagtctaagctaataacggattattgtaaaaaaaacctctgttttatagcagaattttctaccgggccacatacgaattttctgctcttgctgtcttcagtgttaacagtgggaaattgtggacacttaaactgagcagtacttagaatttgctggatatgctgaaaagtaatccatcagcattggagaccacaagcagtataaaattgttgatacccatatttatttttattttctttaggtggagaaagagacccttgagttagagtttttggatgatgaatttagtactcaatcattagtatatttgtgcatgtcatattctaggtcacaataaattatcaacatgccacatttgtggtagttagataatgcttttatttcctcttttttccccacgttgaatccagattaacataatatgttaatttgtgtttttctcaactgagtgtggtaattccattgcattaaagtgttagggacttttgtcttcactaataatccacttaatctctcacaataaaaagtactttcatttctactgacttacatttatccaatcaaaactttttatattactagactttttgttacttttacctagcatccaaaaccatgttttatgattggttggcaaagagctgtagaaaacagattttaatattgcaatgtatattgttaaattttctatctgatggatttccagaaatattctgtgttatatacataaaaaactatatgcataattcccagtgagacagttattttcattactcgaaatactctccttgaaaattgtaattccatgttccattacatgcttaccaaaaatgattccaggttgggggagtggttgattccatatactctcaaaatttccaaaaaaataatttgagtggacttgataaactttaaaaagtattaaattcctatgcagtgtcatctgtcacctccccccgccaagttgcctggctagctaccatttagtttatgatgagatgagtgctctggccctggggttcccaccccaccccctttagtcagagtgctgttcttatcatgtggtatgaatcagaactgatcacttacaacacatgttataagtgattggatgagataggcaagcacaatttttagatgttataaagcaaagcattgctgcaatttctgggtaagttttcatgaaactcctgtagtaacatatttctctttgctcttaggaatgtcctgagtgatcttttttttttttttttttttttaagcagtattagtttttaagagctttgatcacattcctggcctgttttctgttggtggtactatcaggctatgagatgataatagtccccaggtgcatgaaatcttagaattgggattaggccacatatctccttttggcttcttctgcagagggtcgtctaggctttgtttatctccagagattaggagtcttttatttcttatttttatttattgagacaatctcatgctgtcacccaggctgaagagcagtggtttgatcacagctcattacagcctcaaactcctgggctcaagccatcctcccacctcagcttcccaagtagctgggactacaggcgtgcgccaccgtgcctggctaattaaaaaaaaaaaaaatttttttttttttttttaagagatggtgtctcactttgttgcccaggctggtctcaaactcctcctgcctcagcttcccaaagtgttgggattacaggcgtgagccaccatgcctggcctggggaacttcttgaccatggtccccagaactggacccctttctcattatgggatgcgctctgatttatcaatgtccttcttaaagtgtgttaataaagaactcatctagttctccagatatagtgtggccagttttgagtgtagtgagactttaatttcctgtgatctggaaattgtacatttgttaatgcagcctaagactaccacacctttttgtcacttacagtggttcatatgacacagtcagcaaacatttctgtgcctgcctccaaacacatttccccattaaaaagaaaaaaaactgttgaacttccaattttatgttgattttcaaacccagcattctaacttgtcagtgtaatttaattctgttgttgattttattgcttattttatttcttgttgttggcaagtttaccgatctgtcttctgggttgtcgtgtgatacacacagacgtaaatgcagaggaaaaaagttgattttcataatagtcagcaacagtaataactaatgccccacacggacccccgtgtcacttttggaaaaaaaaagcctgtgttcatagagcagccttaccaagggataaatgttttatggcctggagcgaaatgcatctcaatataatggctgtgttattttttagaagccagttttgtttttctttcccctttaactgtattccttttttttttttaaacattcccattggataacttagagaaaggtgaataaatgcaaatcaggtggttttgttttgatttaatagtacctttgataaaaggaattgattctgctgagaatttggctgtataagtgtgttgccatagcagacttgcagtcatgaaatgattggcatgggcttaaacctttgaatcacaccctggaagcagataataccttaaggaatctcttgtctggagttgtttcttacttacagagcaggacactcttcttcttccacgcttacttatagtgatccttagggaatgagcaaaataggagtaaacttggaaaataatttttaggggattggaatctgaggaataatgataaaaaatagtttaactttgaaaaaccattttatgccaggcatagagctgtgtgttttctgtgtactatctcatcatgacaagcctgaagcaagtcattattggccccattttgcacaggctcaggcaatggtggaattatgtcaagcaggcaggaggcttggtgatttttgtttggattttctttggcttgggaaagacagatttgccttttgctagaaaagaaactccttcagtgagctatcatttcaaagttgatgtctcagaatgttgtggagatgcagccagttcacctgaaggtagtggtggtggttaaataaacatctctgtaagtctagctcttcctacagttgtgaaatctgagattttttggtttgtttgttttaatgtttattggtagaaatagatcatcaatgcatactttgtatttatataaactgcattctcttaaaggtttttgttttcattggaaatatttagcctccaagtgaacttaaagtattatctatgcaatcgattctttatagactttttttagattttaacactaaatttgagaaaccatgcatattgtataccttatttaataatccaaagaattgtttgcactttcaaaaaagttacagaaaggctgaacacaagttaaataacctgtatgtcctaaattttccattactgaataaatacttgttcagtattatatattgcttgctttctaataagtcagattgtcagagatgtttcagtaaattatctctatattaaaattatatccgaatcccttttctctctgagatgatcttgccagtattaaacattgtgccatacgcagtattagcccaaaagcttaaataagaaccaaacttgtacactgaatattttaaccttagaattatataactatacatatatgatatgctgtatattaaatttaacatttcaaataacatgtatagcacacattcagccacatactctcatgaaaaggtattattcgtaaaaagttaatgaaaagcttatttagatagaaatgtctagacataaatactaagcctatgaaacttgaaagtaaagtctgctgtgctattaaggaaaagaagattggtttttaacctattgaattgtgcagatacaaaagtgcttagcatgagaaaattaccaaaataaaaacattttagaggttatttggttctagcaatgttaattattttgtgtttctggataatttaatgtttgtattttaaatgttatataaatttcctctttataacaagttttaaaaagcacgcaaaaatagttcaaactatatataatctgttatttttcatcctagttagctcatcacaagtaactcagcaaaacaatgcttgaacattcagttctactaaaatacaatatttgagtagatcccatcacttttacccattgtttgctatgttggaccctaaaacaggctgctgacagatcggacaagtgaaattctctgagagccatcggtcagtacaatgaatatgaaattcatgcctgcaaggtaattgcctgagcttgtttccagttatgtggtcactgatacaaacactacagattttacctggttcactatcaatactgttatgctctagcgctgggtggaaagattgtcagtctgctctttggttaaatcatgtattcaggcgggcgtggtggctcttgcctgtaatcctagcactttgggaggccgaggcaggcggatcacctgaggtcaggagttgaagaccagcctggccaacatggtgaaaccccatgtctactaaaatacaaaaatcagccaggcatgatggcgggttcctgtaatcccagctactcgggaggctgagatgggagaatagcttgaacccgggagacggtgattgcagtgagccaagatcgcaccactgcactccagcctgggtggctgagtgagactccatctcaaaaaaaaaaaaaaaaagcaaggggaagaatagtagttttccagtttgactaaatcatttgaattttgcaactacatgctacccctattgtcactgtttcaggtatgaggctgggtggtctcatttacaccatgcatttcagtgctgtctccttgggcctgcctgtcccgttccctgtgctggctgctgtcagtaactgtacctaaggttactcagttctcaatgcatctctggtaaatgctgaccatttctctgaagctctgacttggagaaccagagcttctctctagtggttgaaccctcccttagagtactagattctccagacccagtcataatctgccttaagattgaccgaagagccactgatgatggctcaacaagctcgttctcagaaatcctaggaagaattatggtactaacataggtttgaatacgtgaccgctctaaacgagaaatgattcggcagaagcccccactattgctttgaatagtgactgtatgttctgttagccctactctggatgagttctgtttgcaatactgtcctgatctctattttctccgggatggatccttctcacttgaaggtccagtgtgattgttggatgtcgtagtacagcagttgaggatctgctggattcttcttctactgttattcttgacataagtcttgaattagagaatggggtatatgcagtacctctgtgttctctatcttgctctaaaaagacttgagttatacctctcctcctgacagatcttctagtggtttgctgtactggtctactttccctttgtgaattatgacaaacagtgccactgtgtctctgaattggtgaacagcttcggctacttatagtagatcttattggccctaatctttggtttgtatttctcactgtaacattatatctagccccattttcccaaacatgtgctgctttaaactgttgtgcctccctttgcctgagttagctgccacccgactggtttgtgtgactactgaaattagtgcgtgaagcactagctctgggaatgccagctgatcccccagttccattttttaatcttcctactgttgagaaagatccttcagctgaatttttcccccttgaagcaagcctagtccttagaatgttggaactaccaccattgaaattcactgaggtttggcttcttgttcgcctagccacaggactagatgacctttgttgcctatttgtaatatgatctctgttactatctgaaagtggaatgtttgtataatctccatgaatttcagatcctctattttcatgatttatgtggatttccaaactaaaccgaaactctccactgttcgagtttgttcgactcacagctctccaattttgattcccattttgtccactttgagttgcatttcctgtgccccgaaaggtgttcaactatgctagaagagaatattcatttgaactttctctggggacttctgagtctctgtaatttgttccatttctttatttcattttatttttttgagatggagtttcactcttgctgcctaggctggagtgcaatggcatgatctcggctcactgcaaactccgcctcccagattcaagcgattctcctgcctcagcctcctgagtagctgggattaggtattacaggcatgtgccaccacacccggctaattttttatatctgtttagtagagatggggtttcaccatgttggccaggctggtcttgaactccagacctcgtgatccacccactcagcctcccaaagtgctgggattacaggcatgagtcacggtgtccggccagtttgttccatttctcgagtcaggctgagatgctagttgtttgttgaccccatctaaccactgttgcagttcttctgatgttatttctctaggggagcctaaaagattatggtcctctcataagccgataatcttcatcgagttctcaggcctcttctctgtggagatgctcttgctgccatcttctcccattttcacaaatgattacggtcttgagataaggtttcgtcaccaccaccatctgatctagatctagactgattcatcctgagattcctggctttcttattttcctttcaatatgcttttaacatatgccatggtatccatccttcaattgtttgtgcctttttggagagctgtccatctcttcccaactcaaatccaggcctgttggtcttcagggttcttagttttaactactgtactgttcttggtttcataactctgctgttcagtaaaataacaattattgtcctctctgccctcatcactcggcttagccaaatcatccaccagaatacaatcccgttctgtggaacagctcttgggagcttggaagaagaaagatgagtgggtattttagtatgaattggtggtattctacatgtatatttaaagttttcagggccaggtgtcatggctcatgcctataatcccagctcttggaggggagtgtagggtgagatgggtggatctcttgagtccaggagtttgaaaccatcctgggcaacatggtgaaaccccttctctacaaaaattagcagggtgtgtggcgtatgcctgttgtcccagctactctggatgctgaggtgggaggatcacttgagcctgggaggcggggttgcagtgagctgagattgcgccactgcactccagcctgggtgacagagctgggaccgtgtctcaccaaaaaaaaataaaaagttttcaggtcttgcagtacgctggaagaaatatctagaacggcagatgatgtgattttggcaagcgtgtcacatgttgatttctgttttgccggtgaatgcatcaggcctgaggtatgtgtgggatctggacttctccatttcttgtttctgatcacctgaggcttgcactctggagcttttccttccttgtcttcagagaatttccagtgtgatacatctcatttgttgtattacaaacaatgtacagaacacttaatgctttcattggttaggaatctctgaaattaaaaaggaaatatcatgttagtttttgccttcttatttattgttcaacattgttacttacatcttttttcctattttcaggtcattttttttccccccaacatgtttggtattccttctgtccacctgttccttcacccaaatatagttaggagaggagtgctgacctattaaggcgtgtgtactgtggctctgtgtctctattagatgagactgagttccttttctggctcctagatgctggggacgtattacctggtcacaagaatgtgggttctgatatgatttcccacccttctctcttttagtagtaaacattcttagtaacctttcacctttcttttttttttttttgagacggagttttgctcttgttgcccaggctggagtgcagtggcgtgaccacaacctccgcctcctgggttcaagtgattctcctgcctcagcctcccaggtagctgggattacaggcatgtgccaccacgtccggctaattttgtatttttagtagaggcgagtcttctccatgttggtcaggctggtctcgaactcctgacctcaggtgatctgtccgccttggcctcccaaagtgctgggattacaggcgtgagccactgtgcctggcctttcacctttgttattggtcaaggatagattgttccctaaactgtcatttctcttctgttatcccattagaaattcatgcagaaattaatactttggtatcgtatttaaacatatctgttcagttatttctatttcgagtgacttggatccagtagggcgggtgtgggcaggttttgtatgtattcacatgttagcataaagattctaaagcatgagggctttccattgaaaaaggagccccgagaagctcactggaagtgagttgcaatagaacgttgtttcctggttccttgctcctttctccatctgtcccttttgctctggctccggatctagactgccatgtagtgtcagtttttcttttcattccttggtctacttcaggtcttaattttattctgccttcttccctccacaccccttgcatgcagcctcacagatcaactctgtcctaagcagagaaacacaacttcgtctccctcttgtatttcagtcttattctgccctatagtagcttccgatacctccagcaataaataaaatccctcatgatggccttttcaggccactcccgctgctgctacctgtgagtttaccaatgggcttctcattcttctccacatgcgtttggccctccatggtccctcttcttctgaaatcctttttcctgtcttgttcattagatgagcatcgtctcatccttcagactcatttcctttacagaacttttcagagtacctgttttagttcttgtctttcaaattttttctctgtccttcatacatctttaaacattagtccctttgcagcgctctctgacttaattttttgttgtgtgccagggtgtgcagtgttctttttttgcgttttaattttttttttcatttaaaaagaaatcctccttactatcattcccagatattcttgtctcagctaaagatacttgtttttcattttgagtaaatattccaagtaactaaagctctttcagatttaggaagaaggcgtttttcctttcccttcctatcccacatccggtttatcagcagtgctgtcatctttatcttcaaaatatatccaggttcctttacttcttaccccttccacttccgtgtctggttcaagcccctgtagtttctctgcaggttggttgctctgtctcctaactgcttttcttacttctgtcctttcttctcttgcagcctgtactcagcaaggccagacggatcctctgctccaaacttgccctggctgcctacctccctcagcatgaaagctgaggttctcgcagcagactgcaaggctctttattacagccgagccctcctgacgtcattttcctctctttcatgtctctctggtcacttggcctcctttcacgccatgcatccttctgcctcggggctttggcaccatcccttgcctctctttggaacactcttccccagatgtctgtctggctacttccttcacctcacctcgctcactcagatgtcaccttttcaaagcagtcttccttgacctcattgttgataatcacagcctcctcacatgcccggtatatgccatgcaccatcccttctgctgtatgtatgtatgtatgtatgtatgtatgtatgtatgtatgtatgtatttgagatggagtctcactctgtcacccagagtgcagtggtgcgatcttggctcactgcaacctccacctcctgggttcaagcagttctgcctcagcttcccaagtagctgggattataggcgcgcacccccatgcccggttaaattgtatttttagtagagatggggtttcaccatgttggccagtctggtctccaactcctgacctcaggtgatccgcctgcctcggcctcccagagtgctagggttacaggcgtgagccactgcgtctggccccctctgctttatttctcatagcacttgttgccacctacccccagtgtgtattcttgtccatctcccccaccatagagcagaggctccacaaggacaagcatcctctgttttgttcattatcttgaacccacacggtggtaggtgctcagcggttgtttgctgcatgaatgtgcattttatctacctctgcattcactgtgtgcttttctgccttactggagtgatgggagtgatcattgggaacttcgggttttttgcatacccacctatgccatgtcttctggagcttggcaaagacttcctcttactgtgtacattgatttgcctcctagctacttcagcatggttttcaagataggaagggatgagcctttcaggagaaactttataacaaagtgtgttaagtaactggccttattttatacacagtttaaatccagcgggccctggatgaggatttgagaggatctctgtgctctgtagttctgtggattagcacttggctttcattgttttcttttagccctgactttctggttcacatttgtttaaatagtctaagtgtttcagaggccgaggggttggaaggctggccaccagataaggggagcatcactatccttgtgctttcttctctgcagggccaagagatcttccactgtgcactgtgagaaagttgctggcgttgttctcagtaacaaaatcttctacgtgaagatttgctgtcccctcagttccttagttttcctctttacaaaatgaaacgtcattgaccatgttttcaggctgcttgcaactccagtgaccttgagtcctgtaggtccctcttgctaagtagaatgttcagatgaattaaatatggtgccattgtgttgcagaatcacactttgaaaagaggtcctattccctgcagtgctcttgactttctgaagaggactgagctcatggtcagcatgtttcctggtggttaaacatatctagctttaaaatttccagctgctagaggagacgaagacgatgagaagcaagcacacagcaaactgtttggcttttagatgcatcctggcctggccgggtggacttgcacagaactgctggtgccaggttagttccctgggacttttccaacatttgtctctgtattgagttttgtccttattcctgaaatagagtagccactgaaatcaggaaccagaacttctggaaaatacctttggaaaccactgtgttgcatggtagaagaaaggcaactgccagtagttaaaataccgggttgagtgctagttttttcaccctttattttttctttttaaggagaggtctgatttactttcttctgtctgttaaagctcttcacaggttcttagaaaaacaagccatttaatggtaccagccgtgaggatccaacttcagttccatgaaagctgcctggtagttctggtcacagggtcctgatgggagaccgtgtaactgctgctaggcagtcagctggagggctctggtgtggctcacgcttgtgtttgttcaagtgacctgaatgtgcttcctctttggggacctgtttcaaatgcacatgctgacgccgtaatcatccactaaaccaagtgagagtcaggaaattcaaattcgtagtgcctgtgacttggccacactccctgtacacataaaacaaggtcttaaatcagagaaactaccatctagattaacactcaaactgcagatggggaccggagctgctcttggtgtgggaactgcaactttgaagttccagactttgatgtgattaacatttcagacttaaagtcctttctgtgtggtaacttttttttttttaaacaccaaactgaaaataaaaattgattagattaggggtgtcggagaagcagattgtaaagggaggagccctcttgcaaaccacatgtaactatgtcacatccttatgtgcctcaggaagagagagatgacagactagtgacctttcaccatatctcttttacttatagctgttcttacagagaccctgccctccaacacacacaccacctccaaaaagaggacacttttgactttgctatctcttattgaccaagtgataatcctgatggagagatggggtttacaggcatgaggtgttcttttttacccagatttcaaggttcaaatactggagatcatcttacagccttcttcaaattgtggctgattaaagtttaattcttcacctctgtcttgctggtgaaaggaatacgagggcagggaaagtggagtttgtgggtcattcctcttttaaaacgttgccattaaaattgtagataaaccgatacacagtagtcctcctttataggagggagatagttccaggacccacagtgagtgcctgaaactggatagtatcagaccctgtgtatactacgtttttccctatacctacatacctatgatagttatacattaggcagagtaagagattaacaacaataactaataataaaacagaccaataataacagtataatgtaataaaagatagatgaatgtggtttctctctctctcaaaatatcttactgtgttgtactgcaggtaactcaaaaaggtggaaagtgaaagctcagggaaggactactgtacatggaattgacatcaagcaaacaagaaatgttgtgcctgggatgataaaatttcttggccactgaaattgttgggccagccttctttttgaaagaaatctccttaggcatgcttgcgaacgcacgtgtgtgtatacgtacatatgtgtaacacacacacaagtctcttctgttttcttaggttaaaaacctgaggtgtcatcctgataatttcatggagaccctgtaacatttttgccatcatacatggcactttatcttcgtagctgtgtctgtgatatactgtctgcctgctgtgctctgtccatttgagctttctagaaccctgtaggagaggtggggaagcctggattttgttggggagatccaaggtctctatggcatgacagctgataaatggaagatggataactgtaacccttgagtcattgtgttttctgctggccctttcagtctactgaccttgttttcagtaggcctgtaaaaaggcagggcaaaacctagccctctagtagagtttttatttttatttttatttgtttgtttatttatttattgagacagggtctcactgtgtctcccacgctggagtgcagtggcgtgatcttggctcaacccccgcctcctgggctcaaacaaacctcccacctcagcctcctcagtggctgagactaaaggcatgcaccaccacacatggctcattttttgtattttcagtagagacggggttttgccatgttgcccagggtagttttgaactcctgggctcaagtgatccactcaacttggcctcccactgtgctgggatttacaggcgtgagccactgtgcccagcctaggttttagggtttttacattttactgttgacagtactgtagctgtgatgggaggagggaaataacagggctcgtgagagagtgctgagcaccgtcctctctcccaaacacagcttccgtgtgttttagatgtgttctttccctatcatgccatccatgtttaggggcacaagaagagtcaggtgaggagggaatgggcatttaagtccacgtgaacccctctagcagggttcccctctgcatcactgtttcaaggagatgggatagaattatggcgtaactgttttaatgtacgaaatcagcagaagcgatgaatatttttatcttcaaatttgtattacacactgaggaccttatatatgattctaaatttattggtcatatcctgaaatacacactgtgtgtacctagtaaccttgtattggttacagtggtgctgtcttaagtttgtttatttgtttgtttgttttaaataatgtctgaacccaccataggggtagcactctagcacagttttgggtaacaaataagattgcattctgacatggtgtcataaatcatatctaaaagccgtgaggtcacatagaacttgtttatgtaacagggtagaacaaaactcattgttctgagaatatattgctcactcattttatcctcagtcacgatgagttttacagcctatgtgcagtattgatgccactgaataagcatttatttttgatgaagatacaacttttctcctcacgttcagttgagagtttgcaacaagtaagactttgcattctggaatttatgtagatgtatgtgtatagatacatgtggtttttaaggcctggcaaccttaatgaatactggtagaagattttggctgtcttttaacagcattaccatgtggttgaccatttaaataagcagcagtttatcttgatgtagtgaatgcatttaattggttatcctggcaaagcagggtattcgttggttacaagcataattttctgagtttatattatttttccttctagatatttgtgagctattgtttttatagcctatattgaaacatgctttttctttttaaaatggattgtagtatagagctttgttaataaaaaaatttaaaataaaaatggtaaggcagaatgacttagttatttttatattttcctgtaaaaacagcctcagttaagtgagccacaatgagccatgatgtatttcctccatcaggatggaaaataagccatttattatttcaggtctgactcacagtgaacctgctgacactgggatgttttaaaatcataatcataaggaacaggttagggcagaaacttggacgctgggcctaggattacctgcttattacaatgttttacaacttggatgctttaggttttctggcacaatgtcctaaacctcacacactaaacacccccttgttgtacaattattgcttgctggttttagatggtgccaaatagacagatgcctcatcataattaccattttttaaaatttcactgttatagacatatataaataggttgttatctcctctcccttccctcagtacagtatgctcatgcttccacaaaaagcaccccggatgtccttagttaataaaaacgggcagctgaggagtgagggtgtggcaggtggatgcagcgtgtcctcagtgtcgcagggtacataatattaaattacatgtgattgcaaaggaaagcagttacgtcgaatacagttgtgaaaattgtcgtagggtaatagatgtgcttctttatcaatacattaaataatatttagtggcgggtcaccataattttgaggtggagatgaataaacaatattttgagtttttgacagcaactgtaatgtgaaggcatccgatttctattggtgtcaaagtcacaggtactgccaatactgtgatgtgttgcctacattcgtaattggaaaaaatgctgaattttaatgagcggctcataaaaatgtgttttttcctatccaaggtcatgaatcccttgagttctgtccatgggctccaggttaaaatcctgggccttgaggaatttttttcccccccaccctgaagaatttctttaggcgtgagtttgaatatatgcaaataaagttttccttgaagacagtgctattctactggccttggttcaaaaataggaagacatgtttaactcttgtttttatagtcaatcctaattatctacagtccagaattgaagaaattagccttcattttcctgagaaaatcacatactcctttgacatcaaaagaaggatgcactgaaacctgtattttctatggttttgagtaaacagacttacatttacaaatactcatgcataattctatacacattctaggcatattaatacagtgtagactgatataaaaaattacatcctttccaaagtaagtgtatgcctctcctttgtaaaacagaaggaagaataaagaaagcaaacaaattaaccttgtcatggcaagcagaagaaaaaagaagcagtaggctcccagtttggtattctaccctccagatgactttattgcataatatgttttgtcatccaaacgtaattttatttcaggtctactgagcttcaaaaattacaaatgataacgataattaattaaatttgagtagttttaatgacattgagctgtgtgctggaatgggaaaatggcacaattgaaggacatttacattgaatgtcattgtttaaagttaccctgatttggaggcccattaaaaataccaaaagtcattgtattttaacatttatttcagctgaaggttttaaaacagcttttaaaaatctttagtacctgcagtgaagatacacgtacccccttcccacctatctctaggatccatcatatgagctgaaaattatctttaataaattaaccatgatcatgacaaatcttactttactgctttgaaggaaaaaggaggcattttgtgacgtgacactgaaaggataacatttgttgccaccctcttatataatacctaccttaagaatcaggaaaagccttggagatgacacttcaatttgtagacaatgttcttttctgaagagaatctgaaaaaaagatagcctggagaaatcaataaaatgtaaaatagaaaaagaataaggtgattgctactttaacaacaagctaatactctgaggggttacattagtgacagacaaggagaaatatgcatttttgacttgaaggataacacattgtatcagttagcttttgctccataacaaataaccccaaaagtctcagtggcatgcaactgtatgtatttatttcttgctcacatgtatgagattccctgcagcagcctactccatgtgtctcactttgaggccttggctggaaggtgagcgactagggtaagttcttctcatggtagtgtcatgtgcaagagggcaagcctgactgtatgagtatgtttcaagtctctgccagcatcagattccctagcatcccattagccatagcatctcttgaatcaagaaggagaaaagtgtactttaccgacaagaggccatagaaatacaattaccagggagtgaagaattgggaccaataattctgtcctaccacaaatgctaaaaatgttagcagctgagggtagcttttggttatgagattatatggtggtgtcttattgcctttggcttttgtcatttcctctgccccaagaaacactagttcagtttttcatatggatgttggaccgaatgtaacacaccatgagagacatgttactaacagctgggtaagggacaagaaagagggtacgtgaattgaggtaagacttaagagatctgggttcaaaatctgtttcagcagtgtaccaattgggggaaccccaggcaattcatgtaacctgtttctgtcatgggccccttgttctgtaaaatgaagatactgggctagcccgtctccttagttctttctaccactagaattgaggtttgatttcttatctgtagataacaggtttcatttattggcacctccattctcacctttgtgttggtgtaggctcaaggcaacagaatgactttagtaggcaaatggggttaagtaaaaacattgagtgtatagagatgtattacctatgtgtacaatactaaatagtgtggagtaatgactgtcgaatgctgtgtttggggttatagaatctcccctataggctttaagctccctgataactttatttccctccctccctcccacccatctagtacagtgcctgacttatagtaaagcactctaggaacaaatggttgaaggaagaaaccccaagtgggaaattagtaggggaacaattccctagcctgaaagtgtatccaagaagaatgatgtttttctggtgcttatatttattgcctaggatggacagctttctgcttcagaggattgggagtgttcatccaagcaagattgacatagacatttgatgctgtgtccccagcattttgctaggcgctccgggtgtagcacgaggaagcatggttgcaacgccctccggtttttgtctggaagacagatgtgtaaacagaattgcactgtgccttctgtaccagaggcccaaccaaggcatagaagagccacgtgggagacatagggagatctcacttggaagaaacctgggtctggtcttgattgaggagtggggagaagttgggcagatgtgcgggcttatagagagctttctgggaagggtgaagtggcacaatattttttgggggcctaactacaaagtctgaagggaaaggcaaagtgagacaaagcttcagaggcagacagggttagatctgagagcattgcatgatatgactttggtctttacctgatagaaaaaggaagttactgaggaatttaaagcagggtcagggatgtgatgagataggaatggcaatgaggaagttggatgtgggagttgcagggacctgcaggctgcactatgacttggggaggatggagggacagcagaggggcatgagatgggctgacatctggcaagtagtgtctagtatggacaatcactcttacagccctcctcagtcgcttttggcaccctgcctctcccccagccccaccatagaaaataacatgctgtgctgtcacttaaaacccccttttcatggccgggcgcggtggcttacacctggaatcctggcattttgggaggccgaggcgggcggatcacttgaggtcaggagtttgaggccagcctggccaacatggtgaaaccccatctctactaaaaatacaaaaattagccaggtgtggtggtggcacgtgcctgtaatcccagctactcaggaggctgagacaggagaatcacttgaatctaggaggcagaggttgcagtgagctaagattgcgccactgcactccagcctgggtgacagagtgagactccatctctaaagaaaagaagaaagaaagaaaaagaaagaaagaaaccaaccaaccatgttgctggtccctgaagtagtccgttttaggctatatagctctgggtgatgagagagatatggtgtagtctgtgttgaagagtgatagaaactcagtttggaaaactgtcaacttgataggtttaaaaccaccttggtcactaaagtggtggaggttattttgagcttcaatttttacatttgctttatcttgctagataacatttggaaaaattgttattctacagtattttggttaagtagaacaagcctttcagtaaattccactacattattgttataattttttttttgtcatcccagattagttgatatttgcattattacttggtcgatgtacgttttctagattattaggctcatacctactacttttcaatacttgtcagctgataagaggtatctcttagtggttagtgtcagcagcattactggtataatttgtggccttctttcacacactagttttccacacctccaagcaggttcagggcttacgtagctactgattcatacgtactgctggcaactgactagagaggtggaaaagggagtaccttgggggtttaggggctagaaaaggtcaccattgggttggaaccaggaaaaaacagagtgcacgcctatgatgagcactgtagtttaggtagaatttcaacaggctgaggctgtatttttgggccagattgagaggagattcagggggaggagcagcctggacaaaggggaggaattgagaagtacagtgtggttggattcgtgtgattggagttaaggctggagaattgggagccatgtccccatcatttctttttgagagtagggagctatcgagtaggaaatgtgtgtgtgtaatgctgacggtaatactgttaggttaaagttttaagcaccaactgtgagcgctggggtgcttagtgttgtaacagagcatctccaggtactctggaattctctcaaaatatcctggaattttccttgatcaggaaaaaaaatgatatggtcgagcagtgaattttaagaattttatttttctatttatttacttctataaacatttgttagtaactgtgttttattatagagttgcccacgcagtgtgtggttttggtgactaaaaatgaggattggatgaccattgactaaaaatatatatttatatgtattttatatatatcaacatatacatatatatgatatattcaggtttttaaaagtaaatgataaagaacatcactaattttattttatttttagtaaatcagtaaatcaaatatgtaccagtttttaaattctggaaacaaagattccaggtttctatagcgtttaacaaattattattcatagcaaaatctgcattcctgaggctgggaactagaggaaagggtttgtgtctaataggaaccaattgaattttagaaaggatgttaacatatagctgttttactgtctataatgttaaatgaatacacttttggcctctgtctagaaaaaaataacatcttaatctagtgtgtgattcttatacataagactttttagggatgacagtaatatttacaaataggtaaaaaaatatagagttgtctggtttagactcctgttgtcatggcatgtttaaagaagaaagcttccagccgagaaaggcttgtgatgaagtagcatcacctttcagttagttctctgtagtatagattatgtgtatgtgtctgcctggtcatagatgctggtagctaggtgtccttgcctgatgccaatatgattctgggctgaatgcatatgaatccattctaatataagtgtaaatagcacatgggaagataaacctaccaagagaaccacatacagatcatatggtttattccagaggcaagaatgataaaaaaaaaaaaagatctgacaccagactaattatgagatagttgagtgcactcagtcatatgtatgctttaaataacatgtaggtacatgcacatacatatacagtatcactatctagatttttcaaaagattgacttgtaagaacaagtgacacacatttaaagtgttaatagtgcttctaggtggcatgtcttgtcttcttttttttttttccttagtggaaattgcaaaatttaggctaattctgtcacattcaatataaatcacacagttaaaaagccactctgtagttttcccagtctttgccccattttggcacataattgttcgggataaatttctgtggcgacaccatcatctgctccagctttctcacctgatctttgcttccccagcacaccacatcaaccccagttcttaattcccttgacaaaacacacttcatgattgtatatggcactctgactgctaaagctaagctctagtacagtagttgagttatagttttcttgaaactcagttgtgctttttcagatgtgtttgtgcagtagtaattgttttcctaagaaaaagttagttattaaatatgaatgtgaaaataattatctttaggaaaaactaagttgaaccccttgaaagacttaagctgctgataaattagttgcagtcagaccctgtaagattaggggaaaccatgaagaactctgtagttggattgatatgaaaggggttcagttggattcctcttacacttgaaagaaacccaaattgtaaatctgtggtgacaatatactgtgggtttagggtttataagaaagaatggaagcctagccagagtatcttggttcaaaggtttgctgtacctcaagcacagtttcctgtatatttttaaggcaaatgtttaaggaatacatatatatgtacacacacacatgtacagacacacacacatatataaggtatacatactttttatttataatatatgtatatatttaaaatcctgtgctttaactcaacctttttttttttttttttttttggattcatctgccaactagggtctccatctggtttggattggattgagattggataacacctttccacctaatagcagcattaagagcattgactgccaaaagccatagctaacctactttctttaggatacatattgtttctcctcattaccctgtaataaaataagatttatcttaagcatgtcctgagagaagcctaaaatggaaatacacggtacaggcatcgtaagctgggagagacctgaaggaccattggcagccccctgaattgtaactgaggaaatggctctgtcagattgagatctgcattagtggcctagttgtggagtgacgtagggagtgagtgtatgagcagagcatgtgtggtgttcattcccatccatccatcactcatcctacatgaagttgcctctggattgggaccttgaactctactaattttatggtagtgtaacttgcagaagacttaccaggtaggtgagcttggtagtatgttttgttttgttttgcatttgggaccatcttcacatgtgtcaactaagaaggatttgctgctaacctatacctaaatctctgacacaaatcctggaaaagccttaaatgattggcaggtagtgttgaaaggtgctgtatcagggttttgtaaatcatgccatctagatagaatgcattgtgttggaatgaaattaaaacaaccattttaaaaaatgtaaatgaccttgggtagaaaaacacgagcattaagctgtattagcaggtgaagataaatctctcccccttcatgtttgaaataatcttttacattgtttatgtgaatttctttctttttttcgggtacattgattatgtatcttcccccaccctccacatttaatcccctaagggatcggtattaatgagttttatgctttgaattttaaaattttcttgtcctcaaaagtgagactggggaaaaagagaaaagactttaaacattttctttgaaagcttttagttatctcatatacctattccttttgaaaatttctctgtggatagccggcttagtttcttgcaaatgactaatttaaatgccatagaacatgtttagattcactgtcacatggttgttcttgctacatttcttttgctcagattcatcttcagaaagtgagggagggggaaagcatattaagcatattattcctgcaattaaggcatagattggctacttaatttgtagttagtaaaaaactactgtgatggaactcaaaatattaataaattgagaaaaccagaatgcttgtcttttgctttagtgatgggactaaggtttacatgaatctttctatgtcatgtagtttcagctagtgcctcttggctctgaaagctatgcatatgtaatttcattattattgataacatagtacctctctagagagttctagttactgtatttttaaaatgcaaacatttgaaaatgtagatacaattctattttttaaaattaataggtctgaactgggatctttggtgatatttccatttcaaagtatttatcaaatcaagacattagtggtaaaacagtactagtacaaagatgcttaggtattgctctatatttttcaaaagaataacaaagcaagaacaacatcttttagaaacgtgtctaaaaaggtgccaatgtgaccaaaaaacccatttaatcactgagaattttaacagaaattttttaaagtattatattgcaggatcaatatttagtatattggacaattcagaagatttattcaggtttgcttggggattgagaacaaatacgtgtttaaatctgtatgtataatttaaaaatattagagaaaatttgaaaaatagggaagagtcagccatattgttttaattaaacaaaatgactgcttctgttttagcagtgcttccactttgttttctatgcgttatctttttgaagccactggttaatgtatgtataaagcttgccagcttgtttttgattaacaaagttcagtcagtgaataatgtaaaatactattaacagcataactggaaagtgacttgagcacataaaaatcacctttaagtccaaagttaaattcttgtttttatgttatttattgtttttatttagagaagagatacgtgcctcatcttaggaattctcatttaatatccttcaaagactgggctttaatgaacaaatttgtcatgtggcagaagttactgtagtctgatgaaagggaagatggctgcaaagaagagaaaacgggtggtggggggcattgaggtataataatctgtggctgtgggatggttttcgacagaccagtcatagcccagactcatgtttccaaacatacattaactgcaaaccctgatctcaggttttatgtttttccatcactttttagctttaatttgtagtagattgcttgaggaaagacccctgttgattggttgtaatcatctaagatttatgatgattaggaagtctaaataaaagtctgttagatccaatttggacataaattttgaatgcccagtttattggattgccttgaaattctaattggtaatatgcaaatcgagttagagtcttgactatcaaaatcaccttaggactaaattagacagtttggaagctccattaactctttcagagtactgaactactatttagtctacccaaacagtaatttactaagtttagcatacccagacagtaatttgcaaagtaatactttgaagatgctggaaggagttaatgaagcttctgaaatattgtgttttttgggagaatctgactcagcatttgcagtagttggagttgagaaagggcgtctttaaattttggatgcctaattggcaggaattgttgctaatgctacagtctttgatttttatcatactcctacgctcttcctgtcatgttgcagactccttttactaatctatgtgagtgccccccaaggtaaagcccctgtgcacttccgtggtgatgccttctgactggttcagcctgtcaccttgacacacacacagatggtttctggaggccgatttaattccagctatcttgttcttcacctctcgtgtccatttctctccatcttttctcctgagctttggtctaatttgtcaactcagtggggaccagttggctggctgttgccttgaacttgtcttcctctttgaaatgggtttctcctcctgaagtcatcaggttttgaatagcacttaccataattttttaggtgaggatagttttcagcgctgggtcagtgggaaaaactccagttcaactctgttgcctccacagtagagcatggagttgaagcttcttggagttttcctctttctcttcccctggttggctggaaccatttcatcatttcatacttgggtcactacactggtcttttcatcggcttgctgcctccagtttcctccttcactctgctgtgggcaagatgacacatcactttaattataacatttcacctcctgaagcatcttcagacactctgctactttgaggataaaatctaaatccttttgctgggcatcaagaccactcaccatctgaaaggcccatctttccagcttcctttcctacagattcctctaccacccctccgaggccggaggaggggcactccctccctttgaggtattttacacttttctgtgctcctagcagggcatcccttttccgtacccaccctatctagaaccactcaatgaaaaaagccaggctcacaaagacacatgccacacgattccatttgtataaatttcaataaacaaaacgaacataagtgctagtaagtgacagtacctgtgagtggtggtttcacagggtccacgtacaaaacttcgtccagctgtacacagcccatttgagcctttggctgtgtgtaaattagacctcagtaaaacagtgccaatcgtgtaaggctgtggtgaggcttaaattatatagtgtagtatataaaatgctgagggcaaggcctggcatgtgggggaaatcccatctcttttagacagaagcagtcgctctcattctgaattgtatagtagataaattcttccctgacaagactaactctgcaaacagaccttggaagctttttttttttttcagcgtgtttttcacttgacttttattgccatgttttgttcagttggtatctttggtttaatgtggatatacttgttttttttttttcttgtttatagtgtaaatttttgatcaatagaaataatggcagtagggtgtgttgtagaaagctcttaatggaataagcaattctcccttcccccaaaacattgtacatatcaaaaagaactttatcttaaaagtgtttcatacaacaaacaagatttattttcccaagtcatctagttaccagagaagcatccataaatggtacttagtaggaagacatatgactaaggaagactttcttaattgagctgtgaaaatgaaataataaaccattttgcgagatggcaaacttcagtgtatatattaatcacctggggatcttgtcagttctgatttagtaggtctgggctgaagcccaaggtcctgcatttgtaaccagctcctagtgatgccagtgctgctggcctcagaaccacactgggagtagagcagagctgggggtgtattcaggttcagagatgggacattaggaagggcaaaacaagaacttagctcataaaaaccaccccacaaatttgggtgggtagtgaccttgtgaaccacatatatgtaaatattcctgaaagaatctattcaagaaagtatcaacttgtgttttaaagttttgatgttgtgtgattttttttttgtgctagtggaaaagactggttgatttcattagtttgtttttgttcattcgtttgtttttgttccctcttgcaaataatatatcagaaatggtcatgaattcaatcagaattttagggaaagaaatttatttgtgtgaatgccccttctttaaagaaacagtaacaacatcaacagaaaagccccaaaaactgaactaaaaactaccatcctgcccatttgttactgtatttaatgcatcatacttgacaaagttgctaccctgtgccatattccacctgaagagccagtttcgccggtgttctgtctgctcacttaaccatgagtagatttccatttccctcctctgaactggggcctctttcattcgcttgttccgttttgcctatcacagtcttgacttggtagaggattttattccctgtcagtcttcaacctctgttagcctatgatttgaaactgagaaaagtccaagttggaaattgaaaacgagagcccgattctctgaggctgggaaagcctctgaggacttggcccgagcaccgcccgccaccataacaggttaacaggaagaatgtggctctgcctgccggctcctgggcacattcctttctgtttggggactgaagtactggacacacacattattaaattacttaatgaagattttgaagcacacctctaatccctttgaaaaggccctttgagctggagaagggtgtgtgggcagtgagagagaggcgccttcaccctggtgaacagggccccttagaagctcccagggtgcgagtcagcagcgttccaaggctgaccattactttctgccctgaattggcagaagagacttaggggaaagttctttctagggcaggacccttcaccgggggaagatgtagggtttaggctccaaccttgactcagcattgccatttaccattttggcacaggaccttgttgaagccatgactaagggcctccaggtggtgggctgtcctttacaggtcctgatcacagttagggatgcagctcggactgataaaaaagggccttgggctctgtcagaaatgtgtgtagttgaattacataggtgattctgataataaagatgtttttgtgttcccactaccctcttattgggaagatgtctgccttagaaaataagagaacaggctccaaggctgggtgaccaggaactcatctctggcaacaaactccaatagcctttgtctttatctgtggtaataataattataatagtcctaatacattctggggttatggtggtgattgattgagaatgtataaggaaagactagatattaaagcattaatcacgtgtaactgtctgtaaacagcggttttgtagttttttgcttttagtaaataggctcccccgtgtgatcaatactaaactgacagcaaaagagcagtccattcttattagaccatgcttggggagataagttgctgctggctcatgaaggacacattcttcttgatgtagggaggtggaatgaggatttaggcgctgtcttcctcccctttggggtagggtaccttgctgtcttttgacagaatgaggatgagaggaggtggtaggaaggcgggggaggatcagtgatgagatggcactggggacagtggagagaatggttgtgcatatgatttacggtctttcttttcagtatactacagtgcttagatgtgtatgcagaaatcaagagttatcagtgatgtttgaaaattagatgttgctggcatggaacttccgttttcattgagaacagagcgtgcttagtgacgtgtatatttagtacagtaagacagttgcagaaggatggccctgatggtgacagtgataatcctaaccctagatgctcactggctgggcacaagtacaggatctcactggaacctcactaggtatctgttgtcctccttttatagttgagaaagagaaagcttaagtaatttgcccaagatcatgtaactaataactggcagggatttgagtcaggatctccaaagctacatctcttcctaaagctagttttaaaatttcatttctcatatatggagtagcccacaaaggctgtatgcaaggtagtcttcagaaagcttacatcttcaccaaggcacatgaaactgcagaaagaagcaatgttaggcgttcctgataataattatctgcctggatgacagcagtcctgctttatggtcacagaccccagctttctgccagaacatggctcaggactcctgaaaatcatcccattcgggagcaagtgggtttaatttccttttcatgaaaggaaagattagctttcatgcaaacacttggtccatttggccatttaataagaagactgaagtctcatgttccataactttatcagcctaaaagtccctttgttgtatcataaacacataggctgaaacccctgtccttccaactcagagcaaattctgttgtattaaataaccatgccatgtactgaatgtttttacacttatttattggacttgactcctacctccttcccgcaaaaaaaaaaaaaaaaaaaattagctgacatttctacagggcctacgactaaccagagggaaagagactcacatgtcactgtttgtagccagcagtccaaattgtgaaataaacatactttgaaatgtggtcataaaatacctcctgtattttatggcccacagagaaatgacaaatgtttgaggtgatatgctcagaagagcatagaagtgatcagggtgggtcattttgttaaccgttcaaggatggagattctgtgttcaaggaatcagaggaaattgtgaatttatttgaatttctgttactgttcacttgataattttatagttgtcttagtggcccttctaacagaatatgcccctttatgaaatattaccacccctgccccgttttaccctgatttgatcattatacactgtatacatgtatcatagtgttactcagtactccataattatgtttaattatcatgtgtcagtttagataaaattgtagcatggaccattgacatcagtatcaccaggaaatctcaggcccacccccagacaatactgaacgaggatctgcgttttgacaggatagatagatccctgatgatcccttgtatgttcaagtatgagaagcactgatttttatggtactcagtccccctccaacttactggttaggcttatagaatggaggctttattctttacaaagtgtgtcaagctcttttaaagctaggctttagagaacaaaagtccaagtgtacctgtttagcatcagggctgttttgcatttctagcaaagtctgacttattaaacctcctaatcgctccatctcagttttttctgtttacgttgtatttcatttgcaatgtgaagctattaggatgttccttttgtgagggaaaaggagggatagattccatcttagttctcataaaagtataaaaatcaaaaccaaataagcatatataaagtctactgtatgctggtgcggtggctcatacctataatctcagcactttgggaggtcaaagtaggagggtcgcttgagcccagaagtttgagactagtctgggcaacatagtgagaccttgtctctagaaaaaataaaagaaattagctggcttggtggcttgcacctgtagtcctagctacttgggaggctgaggcaagaggatagcttgagcctaggagttggaagctgcaagtgagccatgattgtaccactgcattccagcctgggtgtcagagcaagaccctgtctctaaaacagaatctcctgtagatggcatggaggagagaagcccgtgtgtattatccagaaccctcgctccctgacgccttctcccctgccttcatcttgtgctctttattggagaaaagtgtgaggtgaacgcacagaaaggtgctccccactgtggcaggttgaacgtttgtttttgttaattaatgtccatgcattctgctctttcagtaactagatttaggtaacctgggcctgtttcccatcacttcctggccttgtgactgggcaaataactttgtctccctgggcctcagtttccttaaccctgaaatgaaggggttagattccagcgctttgcattctctggccagctcttgagcacctgcgactccttcctgctcttcagttcttcctccatcctggctgacttttgcttggctcccgctgcccccattggcccccttaaactccagaagagcatagaagtgatcaggtgggtctttttgttcactatccattaacttttcaaggagggagatgctgtgttcaaggagtcagaggtgaaattgtgagtttatctgattttctgttcacttgataattatatagttgacttggaagtgtttcaaactgaagatattccttaatgaaatatgacctccccactgccccatctttagggaatggcattcaccaaatcctttcaaattcagagaaattagaaaaccttggatcattttagtattaaatttagtcttaaaattgtgggtggttgtcaaatcagacctcgtctaaggggacctcattaggcagttctctataatggtgacagggtggcttaaaatgtcttaactaaatgcaaattatctcagagccaaaagttgagcacttgaaagccaatgaaatatctatttaaggagcacagaaggatgtcagagaaggatccaaagtcctgatttttttgttacattatattggggtagatttactgcaagccagaggattctttacgtaattaactcccatttgaaaaaatagcaaacaataaaactattttttttccctttacctttggtataaatagaactaagccataggttggtatgtttagtaagtaataggtattaagtaagtaatatgtattacttacattttaccatagttgaagtgtgaacttgaaatatttttaaagcacagtctacagtggtaagaacttttctttgctgcagttttagattacctaggaagaagacagtgacatcctggaatgattgtaaattggtgcttgaaaccctggaagtgaactgttttccagtggcaggatgatgtgaggttcaatacttctcccctttgagtcttagattttaaatagtctaattccaaaatatttccttaggctggacacggtggctcatgcctgtaattctagcactttgtgaggccattgtgggcggatcacttgatcccaggagttcgagaccagcctgggcaacatagggagaccctgtctctataaaaaaaaccaacaaaaattagccaggcgtggtgacatgtgcctatggtcccagctattcgggaggctgaggtggggccatcacctgagcctgggagtttgaggctgcagtaagcaatgatcacgccactgcactccaatgtgggtgacagagtgagaccctgtctcagaaacaaaacaaaacaaaaaagcccccaaaacaaaatgcttccctttattcttgaggcatagttgatgttttaatggtgttataaacataattattatcttatataggctgtgaagtgattgcttattggtttggtactagaaaccatatacctttaattatgtttgatcatgtgagacccagaaatgcctcctgtacacgcctttaccatttcttgggaagacaataggggcctgccatcactgtgaagcaataaagtgtaaaggattggaaaatagggattgggattattgaaactggaaaaagtgagggagtaatttaaattctgttttagttattaaaagtctggtttcctgactgtgctaagtattgcagaaagacaaagtgtgagacaaaatatttagatcttcaggagcttacattcaagacaaggttaacctgatgctgtagttctggttgtgttcctccaagaggcaggagaggagaattggagatattcagaacatgtttgggaggaatgtagtaatcagggcacccttctggtttaagttgtcttttctgcttcgctgctattcagaaagtgaaaagctttgttctggaactttgagatatagatgggtcttttgcttttaataatttaaggtaactccttcaaagatattgcaggtctagttcacaaaacaaattgtacagtgagctgagagcaactttctctgtcctgagttttgatgaagttgttttttttaaatcatgatcaggatacaggtcctcaattagtttgtctggaatttagtaagcggagtgctggagattggagatcagagtagcatgaagattgaataagatggggattgcacattctggtttacccagtttggaagagtaatgcataggtaatatacaggttgtgttgatgggtgaggatacagatgtcacagtttgtgagaattcaagtgtagtgatttatttcatttaatctactggcagagctctaatttacttatggagctgtagaaacaaaaaatttctaatagggctgagtgcggtggctcacgtctgtaatctcagcactttgggaggtcaaggcgggtggatcacttgaggcccggaactcgagaccagcctgaccaacatcatgagaccctgtctctactaagaatgcaaaaattagcctggcgtggtggcacacagctgtaaaaatatctcagctactcaggaggctgaggtatgagaattgcttggacctgggaggtggaggttgcagtgagccaagatcgagccacctcactctagcctgggcgatagagtgagactctgtctcaaaaaatatatatatttttagtagtttttgctatagttttatgaaagtaacaagactagtaaaattataaaacaattggcctttatggtctaaagcgttcttatttatagccacccagaatgtatcatctgctagtctccactctgctgtctgtcctttccatcatccctcttgggcgccctacctggctggcctgcccagtaagtatggcaccaggtttcctgttctgggcctctggctgctttgtacttctccattcctggaggtctctggaccttcagctgctcaaaattcaattgcaccaactttgactgaagtgcactgctgatgatccttctctttgtgagccttgcctcttccctatgagctactttctgcctagacctcctcatggtgccgtgtccagaacgtgggagccacccggctaggaaactcaacactgctgccctcctagcagtagcagcaagctacagcttgccccctttcaaggtgtttgaccctgttggatttctcattgctccccttcttgctttgtattttttttggcaggaagagtctcttttatttctgagctgatttgcagatcagaaacgatggacctctgttgaactctgaagcagtcctccctctccacttgggactgctagtcctcttgcctttggtataaaggggtcctccatctgtccccaggccccatcctccgagaggccttccagaacctgagcattgtgtttttctttttcaatactttagtaccttagaaaccagaaagtgataaatgaggagagtaggtatgaagtagaagaggattttgatggccagctcgtaaagtgtagcgttaagtgaaacattgtgatgtgaacaatttggtatttttgaaagtcctaatgctacttgtaccaggtgaaatgtttaaatctctctcaagcccctagcattttgatattcttaaaaaagaaaaaaaaagccacacagaaggcattagtccagcgtggtatgttattgaaactggaacgatattgcagcatatctccacatctcccgttgacggcaaagctgagccagtgaaacaggtgtgagcctttgagactgctgggataacccatgctgtggagatggaaaactaaacttttgagtgagttttctggtttattgggattcatccttggtatatcagcagttgtggtttcaaggttccatattttagttcttgttccacttgatggaacacttgacatctatcctcttctgtaactccgcaagaggggcatttggttaatggtcattttggaaagaaagctattttggggacagtaattgcctggagtctttatgtaagaagagaccgaagagtcttagcaaggagaaggtttctgtttgcggcatttggcccatagtatagtacacattcctgttgtgttgttttgtttgcatcattgggcttagatgttattagatattactagtctaatccaattccttgttcttggagaataggtttcttgtttatctgaatggcttttctttgcgtcactatgccagaatagtcattcttggacagaaatgatggttttaaaatctctcttacattttaagacctgctctaggggttgtaaaatagtactgctgttattgggaggagttgggtaggggccacagcagcagggagagagaggctcccatcgtacaaacttgcagacttttattaaaacgtatttattgattgcaaattatgtcaacagagtgaggctttggtaactcttcaagttactagtgtttccttctttgcatagttgtttcccatcaccctttaaacatctgctgcttctggtcttgtccagtcatgcttgagtgatcagccccagaagtctgacagctcttcctgtcttgactcaggacagtccaggacagctgagctccctgcactgaaacaatgggactcctgaaaactgctctgctgttgacatgagaagcacatttcctctttcttaacttccagaaagttactgtggtggctttgaaatttgttctgaaacaataagctcaaaggattctgttaatctattctgattaatttaggaggcagcagcattcattatttgacttatgttagtggttaattaaccaaagtagaacatgttcactttttataaattaaatgctgatagagtaacaaagacgaaatattttacaacacagatccttgaatttgactctgaaatattctgttattttgcagcagtttccggttttagtgacacttacatactgtttctattattagcaagttttgaatttaagtaacttgaaatggatatgaaagttgtttctataaataatacagactgtactcatgtgagagttttttttctttaatttcattgttggccttgattggggagaagatttatattttatgccagtcttttcttgtttagaattggcaagaattggattgagttgtattaaactgtttatgtgaatagatagttacttttgagatgtctttgaatgtagaatattcttgcagccatttcttgatggtctgccttgactgtcttatggacagttggcatcagtgacactttcatttatttacttatttatttttttttagacagagtctcgctctgtcgcccaggctggaatgcagtcgttcgatctcaggctcactgcaacctctgcctgctggattcaagtgattcttgtgcctcagcctccaaagtagccgggattacaggcatgcaccactatgcctggctaatttttgcatttttaatagagatggggttttaccatgttggccaggctggtcttgaactcctgacttccagcaatctgcccacctcggcctcccaaagtgctgggattacaggagtgagtcatcactcctggtcaatcagtgacacttttaaatcacttgtgtccttgactctttttatgttgtctttatgagggacaggccctttattctaccaaggagacctccatagttgctcattctgaattctttcaggaagatttggttgagggttgttcattaggctggggcctctgccggggtgggttgagattagatggataacaggaaaataatcatagtgcttcccagcccctgtaagtgaggggtcttcttaggataactttttggcttggagtaaatgtcccccccaaaatcttaaactcagtttaagggtgaaaacttaaatataatttgttcctggactttgggattctgtgaacatttgtttgcttctgttagtgatggttatggagggtttaaccgcccacattttcactacctttttagcccaataaatggaaaaagaaaaggtaggcagggaattttgttccacttaaaacatcagttggcctgttcggattcaggtgactcaaggtttggtaatgaagctagagaagtcttgtgcagatacactcaaacttcctgactgtgcagttcagggaattgtaagtagagcctgagcaaggaacaccttgattgttggagaggaaaggtggaagatgagcactccctaatcctcctctactcagtttctttagggttaaatgggcatttatttaaatgtaggattctgcttgcctgaactcccaaggttctgttaattgaattgaatcctttctatcctgggcttcctcccgcaccatagcagatgtgaggatatggagcataatgcagtagtgctctgtactctgtgttatgcaatttgaaaagtgccgttctagcccgaaaatgttagtgcattgactctctttcacatgaaaggccttaaagtttacccctggaagtcaacctagggtggcacagaggcagagacccattaccaccatcaaccctctggcccttttaaaaggtggggagaggctactgtgaacactgaagacagcactttagttggatggacttcataattaatgtctcattaagtgaagacttccgtttcatttggctttccagaccattcggtagaaatgcagaggaatggagggagaacagtgcatctcagttggcaggcaggaagagcagatgtggaagaagcaacaaagattttctccaagcacttgagccgtgctttaggtatagatggactgtctttggggccatcctagtaatcaacatggttaatggcagcttctctctctgtccttgagtcttttagcaaaaataagtttttatttgactcctcaagcaagggtacccagccttggagaggagatgaaattaagataaatctttattttttcttatttgtatttgaaggggaagtttaaaactagtcatgtaaatagctgtttggcttatctggactttccagtcatttttgttttccttcctttcacggataatcaatctttcactatctgttcgtatttgcttcttattgtggtctcctgctccgccctgcccactcccactttttttttttttttttttactttgttctgagcccttctcaggcagaggaggtcaggcaggtacacgtgcctttgggaagaaggtggtggaaaaatatggaataatgagcccttctgactttggattcagcaatttaacattggtgcagtaggtggagttattcttggagtcccagtttgaagattgctgtgcagaaacccatctgtgctgctggttgccaacatttctggtacaaatattgtcatttgctcttgaggcaatctgctatttcagtcctagatgcagttttgtaatatgctgggtaaaatagcagacaaaaaatatcttaagtggtggtataatcttcagtttaaaaacactttagcaatgtttccagtagaggattgttcaacgtgtctcctttccttggctgtaaacataatctaaattcatttttcctcgtttgcctgagccacggttcccttgtgctgactttgcatgtcagtaacttccgtacccatcagagaggaaagacagaggggcagtcttgtgcaggtaaaaggtttaagtagtaacatttccttaagattgcaccctgtagaggtttagcattccatgatcattctgttgataagcaaatgagaaatgagtaacttgctcaaaagttacttggttacaaaaattgtcaaaactgatactacacactatttcccatttggtaccttttatccctacacactatttcccatttggtgccttttattccagactgcaagagtcatatcttctgtgcaggctgctgaacagcttcacaagggggtgcctctgttgcctgtgaggagtaggtgttcttgatgggattggggtctccctggaaacccggggatgggactgtgccaccattttattgggcttttgttattaagcccttcttagagagagaaagcatatcctgtaggaagtagtatgtttccttctgtttctgtggctttctcagtttcttcccatcttgatgcatagtgagaaatccattttacagtatgactcagtgcacatatgcacacaatgatagaagagttttacaaaatagtactgtgcttagccatttatgtaagactgttttgttattatttacagaaatgctagccacaatcctctcaattggtttcactattttatggattgtgatccagagttttagcctgagggctttcccacattctttcaagacctttgtgtcatggcagcagccttgaagttaggggaaacaggtagatgaatccatatatggagaattggccatatatgggaaatgaggagggagttcacaggtcagtcacttgaacacacaatgatttgggctgagccagtttttaagtagcccctctctggattggtctcaaacatggaactagttaaacttacgtactaaatcaaacagacccaaaagacaccgtttgttttttaagtcttgctggcacagactagctaggatagggtttttcatccatctggacatcttgtcgtttagcttttgtatacaacccttgaaaatgggcagctgctgggtccactttcctggatgaggtttcttgcttctttcttttgagattaacctgagtagggctcacctgaatcaattatttccgcagaagctttcatctcatgaaagcgcattccacttttcatgtcttcagggcaaatacgaattgcacttccaccctgaagtcagaactgtaaaggaattttaggtgttatcaatgtttgataagaagtgattaccctttctctgcagagctggaacagctgaagctggtgtgatctggctgggagaaggctgtgctctggaatagtgtcctttccactgagtccctgacttgcctgttggcatatggagcagtaatcttttcaaaactccattgtgaagttggctgtgtgtgtgtgtgtgtgtgtgtgtgtgtgcgcgcgcgcagaggaaatacttacatactaaaggggaaagcgggggaggaaaattccaggaaattgcaaggtgaggttgacattccttattctcttaactcttgcttctgtttttctttctgaaaaacaatgatgacttaaaatttgatcccagaaccaactggctttttatccgtaagattacagttgtgttttttagacatcctttcataaatatctaatgaattgccttttattatttggtgttaatgaccaaaagtaccactaacatagtgtttctcatacttgcctgtcatataagatacttgttaagaatattctgggacttcatcttcctcttgttaaatcagaatctacctggaataacatagttaccttattttcttagaatagtagaactgaaaagaatcttacacatgaaagtagttcaggtgttcccaaacctggctccagtaccatgactgctttaatagattgccaagctgcgcttcatacctagtgaatcataacatccgaagcttcctagaagagtcggaccattagactggagggataactactcgcttattcggttgccttcaggaaaggggaatttatgtgcttggttattgggctgattaatagcaggacaagaaatcttattgtctctgtagattcatccaaataatatccaaatatatatataatgtttgtttgagatggggtctcactttgcccccctggctggagtgcagtggcacaatcacagctcactgcagcctcaacctacccgggctcaggtgatcctcctacctcagcctcctgaatagctaggactatagacacgtgccactgcatctggcttttttttttttttttttttttttttttttttgcattttttgtggagatagaatttctccatgttgcccaggctggtcttgaactcctgggctcaagccatatgcctaccttgacctcccaaagtgctaggattacaggtgtgagccaccatgcccagccccaaataatatttacatttcaggtactgactaggtaggtgagtgggggcagttttgagatgggtgagcaaggtctctctgccttggaggtatatgtggattgttattcagcctttctcaagggatgagttttagagagtggaattagactcacttgaggagctttttattaaaaaaaattctaatacccatataagactgcaaacttaactgataaatgtttgttctcactgctccaccaacctgccattccccatctgtctccccctcttcagggttccctatccctgagacaaaacaatattgagattaggccattaaaacccccacaatggcttctacatgttcaaataaaaggaagagtcacaccatctgatctcactcactgtaaatcaaaggctagaaatgattcagcttagtgaggaaggcatgtataaagcccagattgtccaaaagctaggcctcttatgccagtcagccaagttgtgaatgcaaagggaaagttcttgaaggaaattaaaaatgccattccagtgaacacaaattataagaaagcaaaacagccttattgctgatctggagaaagttttagtggtttgtatagaagatcaaaacagtcacaacattcctttaagccaaagccatgttcagagcaaggccgtaactcttaaattctgtgaaggttgagggaggtgaggaagctgcagaagaaaagtttgaaactagcagaggttgttggttcatgaggtgtaaggaaagaagccatctccataacatgaaagtacaaagtgaaggagcagcaagttatccagaagatgtagataagaccattgatgaaggtggccacactaaacaacagattttcaatgtagatgaagtggcattctattggaagaagatgccatctaggactttcatagctagagaggagaagttaatgccaagcttcaaagaacaggttgtgattctcttattaggggggtaatgcagctggtggcttgaagttgaagccaatgctcatggaccattcagaaaattctagtgcccttaagaagtatgctaaatcaactctatctgtgctctgtaaatggaacaacaaagcctgagcgacagcacatctgtttacagcatggcttactgaatattttaagcccacagttgagacctactgctcaggatgaaagattcaaaatattaaactgctcaatgataatgtacctcctcacacaagagctttgatggagatgtacaagcagattagtggtgttttcttgtctgctaacacaacatctgttctgcagcccatgggtcaagaaataattttgactttcaagtcttattatttaagaaatatattttattaaggcccaagttgccatagtgattcctctgatggatctgggcaaagtaaaattaaaaatcttcaagaaaggatttagcattgtagatgccattaagaaatttgtggttcatgggaggaggtcataatagcaatattaatagaaatttggaagaagctgattccagtcttcatggatgacctgggaggggttcaagatttcagaagaggaagtagatgcagatgtggtgaaaacatcaaaagaactagaattagaagtggagcctgaagatgtgattgaattgcagcaatctcatgataaaacttgaactcatgaggacttgcttcttacggatgagcaaagagagtggtttcttgagatggaatctacttctggtgaagatgctgtgaatgaacatggttgaaatgacagtaaaggctttagaatattacataaagcggtggcagggtttgagaggattgactctaattttgaaagaagttctgctgtgagtaaaatgctatcaaacagcatcacatgctacagagaaatttttcgtgaaagaaagagtcaatcaatcaggcaaatttaattgtgttgttttaagaaattaccaaagcgatcccagcttttagctaccaccaccctgatcagactgcagtaattaacattgaggcaaaggccctccagcaaccgatcacaactcgttgaaggctcagatgattattagcatattttaacaataaaagtttttaattaagatgtgtacattatttttttaaaatatggctattgcacacttaataggctacaatataatgcataccttttatgcacagggaaacaaaaatttgtttttactttattgtgatatttgctttattgtggtattctggaagtgaacttgaggtatctctaaggtaggcctgtatttcatacatgaagaaaggcatagagaccaatataattagtacccatattctacctctctgttttagctataaatataattcttcccctccttgtcccagaggtagccactaattccagagtttgtgtgttgaagggcacctttcctgccagaagcccgtaccctggctgtgctgatagatggggtccacaaattctttgtaggatcccctttttaaaaaaagctttacataaatgttatcatttaaggtaaacaccattctgtaacttgattttctttaataaaagtcagcatgatatttttgagatgtattgttcttacatgaccagatatggccccatacttaatagttaaatcaggaaattgaagccagacagcttgaaaaccttcttaatggaaaaaaatgcaagaagtgggtgggatagagtttctgttgaatttttgtatagaacattgtcatttgtgggaaactagttgatttgaattctgtgttattttgaatagcctaataacagcttaatgaggattaattgcatgttgtatggaaagttaattgttttaatttactatgggtgtagttactgcagtttggttcaaacaggtgaaagttaagatttgtagcataaaacaggaagcagatgggggctaattaaagttctgttgatgataaaaggatgactgatcaaggagcgagcagctggtttctcaatttaaacacaatttgtactattgtatgaagacagccctctgcaagttctcatgagtatctttcaaaggtgaaggcatgtgttccagcaacaagtgtgaaggctgttgtggccctgtttgtgctcgctccccttttttgccttcaagcagtgtcacttcaggtttttccaaaaaagggggttaagggatcacaaaacctggccagattttcagtgatgctctctggacacctgttgtgtcccagaaaagtctaaagctctttctgtctccaagaaaagtgcccaagcatttcatttccttttgtagtttttcttacttatctcaactccgtctcttggcaggctttccaatgttgttgccctgaccataacccaagaaggcccacatctagctagcggaagcgccgggtatttaagtgtgtaggcgaaggctaagcagtgctgtagatactttcctggagcctcaccttgttcttcagggtctttgagcttctggccatgagatgttagggacttgaacttattttgcttgattgtgtcctggatgactttcaccttcaaatgacagcatcttttgttgctactgctaatagtgattgcgtaaacattgaggacaagtgtcctctatgtgttttgcttaaggaacatgccagcactgggttttctttgaatgtgtgcagggaggtgacatgaggtcagatgaggtgtgccttgcttggagccaggggctagacatttgcttgagattttgtgcccataatatctaatatttataagtgctttgtaggattatctcattttagtccttacaaaaatgctttggaatggaagttgtttatccccattttgtagatgaggagattgaagcctggagaggtaaagtgactcagccaaggtctcacatttgctaagtgccagtactggatgtagattccaggtttgtgtgacagcaagcccacgctcctcagccactagttttgtgtaaaattgttgttctctttccccgtctcctgcttaaggaaagatatattgtttcctggaaaaacaaaaatgttagcatatagtttgcaaactacaacttattatttggttatgcaggtgtgtgtgtgttgtataaacattatatatatttcacttggatatattccacttgataggaactgctttgtttttgaatgaatatatgagaaaggaaaatgcctgggtttttgtttgttaccccaatgtagcaacattatgaaaggtaaaatgctctttctttaacagcagcagcaaaaaagacaacatgcaaaggtaatctacaaagtaaaaagccccattatattcaccacctggaagcaacattattgtattcatcaaaattgtcttgtaaaagaagtaattgaccatacagagctcgtataattggtaataaagagcaccctgtattttagttgcaaatagtgtgcaataggtttcaggggtgtcatgattgatgttcactgtcaggtgttgtaaataaactttccaatcccagatggtgtttttgcctagttaggttctacactgatcccaccacatattacactaatggggaaaccttgtgtacaggttcctcatcttccaagctctattgtggtgaccctagaaactgcctatgtgctcacatcatggctcctaacagcatgaggaggagtgtcacagccaaggctagagtgttttcctggcctgggagaagtcttaggattgtaccgcccccgccccctttttttttcattctgctgccttctcagcagtcaacttcagaatcactcttctcctgtcttctttcccccttctttgcttgttccttcctataccttgcttgtctttttacagaagcatttaaggagatggaaaagatttggcccattcttctcctgtcataactctgcctgtgtatttctgaagatgatgttgactgttggggaatgggatgtaggagaaagaggtctactgtgggtcttgcttcgcacggagtaatccgacctggcgtggattgtctggtctcctccttcatccatcaaagagtaaggcatggttcaattacttctagcagcaagtcccacagaacacctgggctttctgagctacctagggcaggtgtgttatttggtaggaagtttgggcagcactggggctttcagtgagagcccctccttctaccttggcataatcataaaatctcaccaatacgtagccctttatgctttttgaagcacttatacccattacaattctgtggggcatttaggacagacattgttttcctactttatagacaagaaagcttagacataaaggatgtaaaaatgtgtccagtcagaaagatagagccagacttagattttcttcctcattaccaccgtcttgccattagatcagcattttccaaaatgtgtgctgctgaacatcagtttcatggtatagtctgtcaagaagcgcgggcaaagaaatgtgtatgtgcgtggaggggtgtgcatgtgcatgcatgtgatcccaccaacaaaacaaaacaaagtctaagggaacagttttgctcttgtttgttttgtgttgttttgtgtactcaaggctctaaaaaactgtacagttaggaatcctgtttaattctgtgtggccagagtgtcccaaaggtattttttcagtgaattcaaatcaccctaaaaggaaccattattttgtagagcacatgccgaagaatgctttagtaggccatagtgtgctgctttgtcctgaagctactttggaggtgctacaggagacctcaatggttagaggaaaatctgatcttcagggaacttgcagggaagagtccagaggatgctgatacacagtcagtggctggggatgctttgggaataaagactgtcccgaaggtggagtgggatgggaggctggctgcagggaatctttgtcataatgtcactataagcaccatgcctccaggatttcataccgagtaggaatttaaccagaatgcacaaaagttctcaatctacaggatcagcattctaggaccagttgtcagctttgttaggtaaagctccatgaactgtagcctgagtgacagctgcagagtttattggcttagggatggacttaagaaatttggacccagtacagccagcatgctgctgcatcttggcctgaagtttgacaaggcacattccctgagtgaggccatctgcatcaacccccgctccactgccctttctttagtacttaatgttcaactttgcgtgcaattttgcttttactagatggcaattgagggaagggtggaagagaagttggtggtaaaggtgccagtcagtgggcacattctgcatccatgttcttaatcagctcttctgtcttttagcagaaatagaacttgataaaactcttttattttgaagtaagtttgttccagccaagcagaaaggataaattattttgcattgatatctgaaactaaggaagcaagtctaacctcctaagaactggtcatggatatcacccttgatctatcttttctcctcttctgttcattctgtttcattctgttatgttctgcttggctctgttctgttctaggcattgagtatagatcaaaaagttcatgtataatatttttaaatcccgacgacaaaaactttagattaatggaggtgattagtttacttagtttgggctggtgaggagaataaaatgatcctagtaggaggagtggctggaagaagtgctatgaaataggaaaagttaataacctaaggtgtggtgttcctgtctgcaggtatctgttagctatcctccataaagtggttttatgttcttctaaagtggacagagtattagactctgtgacccattctacaaaatatttgaactgtctgctaaggtttctttgtttgctagtaactgtgagttttagaccctgtcttaagttgcatggcacacacttggtttgtaacaggaaggaaaggaagcagttagaggtcagggcatctggctggtggaagaagaaaggaggatgggatctgttgagggtaaggttaacatcacataaaatgtttataatcgaattctgttgtggggagtgctcatcaaccttttaaaagttttcaagaattggaccacttgtcttctagtatgcatgtgggcggggggtaatcatgcctttcacattgaggaggaggggtgggtgggtggggggagtctgatgccactgcagcttatcctcatgcccctgcagtaccccacagccttggccctgaatctcctgtgcatccaccagggtactgactaatgcatgagtattttgttgcagctttatccatgtttgtgtggaacaatccatggttacattgtaggccattatttcctttaatttccttttagctgttcaaaacaacctgaaagatgttatagttgagcctagacaatgacatcaaggaacaaaaataaaccttcaaaatgtaagaaccaaatttttatgccaaatcttgtgaatgatggataaaatgtatgaaagcagtcagcttcatggagggagacttttaaaatctgttttcaaaacaaatggtcctggccccagcatcctgccctcctttggctatgaaaatatcagattatgccgtaagtttgaaaacaatcaagtatccttcaagtcatgagacagaagccaaagcttgaatcgaaaaccctgtcattttcagcgagggagacagggaggagggcctgaaggtaacttgtttctggaggcccttctctcagcactagctgcagcagcttcctgttaggtgggagaagcaccacagccaaggacagcagctcctggagatgcttttacttatcaagagcaatgtagatgtatgcaaaaatacagacacccactcacagttacatttgtggataatcagaaatatctttctgctttcccagcagagcccaaactctcctcctatcatccaggtgggaagacaggtttggcgctttgctctaggttctgcattataactttactctgttgtcctctgatcttccactggctgtcctgtgagttgcatgtagggtaaaaaacatgctgctgtgttaaggccccacccaccgtacctcctctctctctctcctccctttctgtgtctaaactcatacatggccatactgacctcttctcttttctccagacataccttactagtgtttttaaaaaagtttcctcacaaacactaatagctcatatttatcggacattctgcacagtggtcagtaagtactgttagtatttccttcttgcagacaagggaaccaagcccaaagatcgcaagccatttatccaagagcactcaggccgtaactgggtttgaactgggccagtctggttctagcacacatgttctgcaccaccacatagtttgtctgtcaacattggttcatgctctgccctacctcaagaattcccatcccgttttatctagcaatccaagtcgtcctttgcttcacgtcccaattccagcgtagggcctttcctttcttgttttgcgtgtgctgcaccttaacgtttctgtgttgtcagccttccgtacatatgtgtaagaccatgggaggcagggagagccttgagccttaatgcctacttgttatttccacagtatacagtaggggcttagtaaataattgttcattgaaaattacattgatcggtattgatttgaccaaatcaaaagatcctaatttatgttattgaaatgtgaatggaaataaattaacttctgaaattgtcagttgattgaaatactttacattaggtaggcccacagattttccagtgacaaaaatgaagataaaaattgatctttggtttgtattcccaataaaaataactgacacagggtcctttgagacccttcctccttggtgcccttcactccacctacccccacccctggcaagtgctctaacactgacttgggcaggatgaactggacatgttcagttccagtcctgattctctgaatggtcccttatttatttatttttgtcacccaggctagagtgcattgttgtgaacttggctcattccaggctcaacttcctgggctcaagctatcctcctgcctctgccttctgtgttgctgggactacaaatgtgcaacaccacacctaactttttgatttttttttttttaatgtagagacaggatggtctcattgtgttgcccaggctggtcttaaactcctgtgctcaagcaatcctccctcctttgcctccgaaagtgctgggattaccggtgtgagccaacatgcctggcccaaatggtccttttaaagtctatcatatatttctgtcagagacttcatgaagatagacctcaatatattggataaccattttagtcttcaaagtagctataaattaagctaggaatagcaagcaattttcgaacaaaatatttctttaaaagagttttctaggtttggctatttattatgtgtgatagattttttaaatgattaaaatgtgaaacttttctttttgggggtggtagggtaccactgaagaatgattgttttacactttgttcagtcaacagcagttctaagtcatccattgcaatcttaactaggctgtcagaatttagctaaattagttttctcagtaatcaaaatgaaaataaattgaaataccagagactacatgttggttcagagaaaagtgatctttgagagttgaaatgctgaagtaatctgttagactgaccttactgctcatctctttgttatataagtatctgtgacagtagagccaataatttctaataaaaaccttgcattttgttctagaatatcatgagtttatagaataattctcgaatatgcttgaaattggtagcattcttcacatgtataatctgttttatgttttccaaacatgttctcatttaatcttcacaatgcaccattcagttatttggtacggagacaccagggcatcatacagctcagattcacacgcgcagtaatgatctaacttggacacagacatacacgccctgacttctagtactcttcctactggaccatattggcaacttcgtagttttaagagaagtagagaaaaggcatctccaaatgtgctaatacatacattgtggtggaaaactaacagcaggtcagagtatcctttttaaaaattttttattttactttaagtcctgggatacatgtgcagagtatccttgaatagtagcttggaagagataaaaaaacgtttgtacttgtgtgcaagattctagccacaatagttgatattcagttcccttttggaggaaattgaaagtgaaaacgctgaaacaatgaggactaaaattccaaagaggagtttaaggtgtaccatcgcaaattattggcttgtgtgggagattctaattttctgttggtttgagtcatcctaaaaaatggttcatttaatcattcattccttctgcctttgctagtttgcccgaagttattaagattatctttgtgttttcatcctcaaacacaaatgtgtattgcgcatagccagtgtgttttaaaagatcaagacttttcttaaaatgatgtcgataacttccaaaggcaactgtgaggtttttttgttttgtttgtttgtttgtcgttttcttttgttttggtctttggaggtttataaagatagtcttgtcttaacgtatgacaacaatatcatccatgtttccaaaaaagacatgattcgaactgcagcattagaataaaacatttaatatttaatacaaggaacactgtccatatggtaaggtttgcttagtcattcaagtggggaccctcaggtggttcagggatcccttttttcctacctgacattctcccttctctctggagcccaaagaattcctagtgggatgtcctcaagtcatctaaatgtggttccagggcagactcaacttggagccttccagaattcctttagcccaggagtgatcttggggaagcacattcttcctgggctggcttgctttgacctgagactgcatttaagctgaaagtcctggtgggcacctctgacacagatgtgcccacatctggtggagtgccagtgactgcgcagtggtgaaagctgctctgcaggcttcttttctgctcagtgggtgctgagttttcaaacagacatgaacatgcagctctcagcacaggtgcttccactggggtggaaatttggccttacaaataagcaaaatgtaggcttcattcatgttaggtgtgtgctgatggggatgtgtggctttagtgtgggcacattgaggagggccaggaggagtcatggaggctttttaggtatgttaatgaaagcagcattactgaaacatttatgtgagctgcttttggagtccccaaacacgcctgggcttctggtgatgctgagggagcagcagtttgtgagggggaccatgtcttttgtattacttagaaggaaggtgtggacagcagggctgttgcgcagcagacctactgtgtcttagagtgtaattgtgctctgcctcctcaggtggatccctgatgtctgtgggaagctgggccacagccctgacttgggctcaatctctgtgatggtgggagtttctctttagcataaacctgggcccaaatagttttgctattattgggtcaacccatttgggaagctatttgatttgagacaacctttgaataatatttgggtggtatataaacaaacatatatattcggcagtctcgagtcgttgttgcattaggcttcctagacagagtaatgggcaagctggtgtcaagattctacgtaaaccctacaggaaaacccaacattgcaggtagtgtaattcagagtgttacactttattgcagtttgctgttgtttttgtaatctggattatcatatctaggtcccaaaatagaaaaaacacataaatctagacttggtactctgtttactaagaattcttagtaaacagactatgcgaaaaaacacataaatctagactttgtactctgtttactaagaattcttagtaaacagactatgtatccaatagataaattcttccctagattttccagatagcaaacatatttaggataaaaacagttctacgtagtacatgctatgggtgggatattgtcctagggattttaatctgtcaaagtttcagtgttcttgcttctgaatttatatccataaagtttttcactggcttctgtaaacaattcgggaacataccttgaatatacatttacctagcatgaacaggattaacaggctcatcaatgtaatgctgacaaaatactttaaaattcactttagtcctttaaaattttagaaagctttaaaatggatcaaagtattggtatggctatgctttattttatgcctaatttaaattcttcatcagaagagagtagatcctaatgcgttctttgtttttggttttaactttgttgtgccttagtcttctggtagccaaatagataaggtagttaattgcgttataatgctgtgcgtttataggaccactgcagattagaaaaattgtatggcctataaaacagacaaagattttcattaggaacagcagaattacttcagcgtcaaatgagtttcctcttaatattctcctgtggtggggccttttgcatctgagacagccattaggcggaagcagcaaaaagcatgggtattccagtagttaattcagtcgaagtttcaggaaggcccctttaggtcactgatgggcaagatgggggagttgtggctgtctgctgtggatttggcagtacctggcctctgtgcctccctggggaggagctggtgagtgggttaaagggtccccaggggtaactgcaggctgcatcaaaactaaatcaatcctaggggaaacaagctccactttgaaatccttggtagcctacagatctctttttttatttactttttttatagtactttaagttctagggtacatgtgcacaatgtgcaggcttgttacataggtatacatgtgccatgttagtgtgctgcacccatttactcgtcatttacattaggtatatctcctaatgctatccctcccccttccccccaccccatgacaggccccggtgtgtgatgttccccttccgcctacagatctcttcaaacaaggcatttagaagaattttagctagatgaaatttagtctctggatatccaccacagggaccttattagctagggttgatgacattcatttgagagctggccttgtttgggttgtgtggtatcattaaacccaagcgtatgacagtgtgagatagtttctgttttccaggctttgcttaaataggggtccacattagcacctgatacagaggggttatagaaggaaagtgattaagatgaatgccttgtgatctggagctggtgtctaaggggattgctcgtttctgcctcacctggattgttttgggatttgtctttttggggtagtttgtttctgatagtgcatagagcccatagtattgaatggtacaggagacttccatttcacttcctgaaaattaaagggctttgcccttcctttcacaaaactgtagattcctttaatacagggttctcatgtgggacacagtgaaattttgtagtgctgctttttaattactaccttctgaaatgcaaaagctttggtatggtgtaatatcattaagtacattttctgttctgtccctgaaggggttttcttcaatcctaaatgtatgaggttattggctgaaatgttactctgaaatatttagacctttggctaataaagatcagacaaaccagagaacatcctccgttgtaaagctttctgcccccggtcttgtgggctagtggtggcccccttcttccttctttgttcctcaataccgtagtcccatttacttgtaacgcacctcttttgtcctgtagtacgttcttacactccttgacctcctcacctcttaggggtcttttttttattttattttatttttttttttggagacagagtcttgctctgttgccgggctggagtgcagtggcgcgatcttggcttactgcaacctccgcctcccgagttcaagcaattttcttgcctcagcctcccaagtagctgggattacaggcacgtgccaccacacccggccaatttttgtatttttagtagagggggtttcaccatgttggccaggatggtctccatctcttcaccctcgtgatctgcctgcctcggcctcccaaagtgctgtgattacaggcatgagccactgcgcctggcctaggggctcttttagagtttgttttccataaagtaaatagtcatgggtgactagtgtttgtgaagagatgagaaagaacatcattctaataatcaccatcctggatataatttgtcatcagtccaggtgcagtggtgcaggcctgtaatcccagcactttgggaggctgaggtgggaggatcagttgaggccaggagttggagaccagcatgggcagcatagcaaaacccaatctatttaaaaaattgtttaaatgtaaaaattaatctattatcagacaactgctgtatctcccttaacttgaacaacatcctggacacacgtgttctgacataggtcacctcaaaaaccgacagaatatgctagttaaatgctcaaattctttcatttaaaattttcttaacagggagaaaacacaatttttctgtaaatgacggattgcagctcggttgtgaggacattggaaataagcctgaggaaggctggctgcctttaaacaggaagtttgtgatgagtgacttttaatcaagttacaaccattcataatggcttaaaaaattgttgtttatgtattctttcacttcctaaaacaaaatagccagtgtttattgtcattgtgtcaggtgatgcaccaggcaacttcatgtatatcatgtatatcatgccatccgtacatgtaactgttttacagatgtgaaaacaggcttagtgatgagatccaggacctactcagaagggcccagcagtaactctgcctccagagccggcacctccggttctgcctcacagtgtacttcccaagtccatgaagcttctcctgacacctatgagttcttccatttgtctttttagtactatttgacatgcaagcataatctcctacattccttttgcagtggatagtcatattttcccttcctttggaatgactgactagagttagagataaagctgtgtaactaaatttgtgtctatagcggtttgagaccataggtaaggattggcttggctaggggaggaatattgcatgttcttggtacttgttttacatttcttccagtactaaagctccatgtggttctattttttgtaaatgaacacccataagtttcccatctgcgttgtaatctctctgaactttgtttccctaacataaaacaagagcgttagaccagatgaccttcgaagtaccttccggttttaccaggccgccagtctctgtccacagccctgggatcagtggagatgctttaagacctctgcacagtgggggtagcagtggggggtatagtggtctttgaggatattcgggcaagaaggaaacgattctgggaaatgaaccagccttatggaaggatctagggtgtaagcatgtagattagctattctcagcagatcttgtgttaaacactttctaacattgatttacatactgtctattgctaacgtgtgtctactgacaactcttgtaaaaaaagggttggcaaaaggtcatgttttccttctgtttgcaaacaaaatggattatttttaaaagttgttgttttattagtaactcttaatgggaactctgttgaatagattttcctagttcagtttgttttcacttgtggaagtgcaggaagagctggtgtaaaagagaggaaggaggagggagggaataaaggccatgccgggagcctgcataacaatcgcacacattgagaaagttcacagaaattagattaaatgctttgggaaaatgtagtttgtctagcattttgaaagaatttctagaatttctgggacaatgagttcatttaatcatatgttccagtttctgagtgtgaagttctttttgttggatttggtggctgttgctcacaccttcacgcagggtggtgggcagttctaggtagctgggggtctctggggacctttccgctttccctgtgagtccccacaggttttccctaggatgatgctcacatctgaaatgcacgcttcagctgctatggattcctgccataaagaagaacccactagaataagagcaaatcacattgtgtaaattttttttttttaagacggagtcttgctctgttgcccagtctagagtgcagtggtgcgatctcggctcactgcaacctctgcctcccaggttcaagtgattctcctgcctcagtctcccgagtacctgggactacaggtgcccaccaccatgcccagctaatttttgtatctttagtagagatggggtttcaccatattgcccaggctggtctcgaactcctgatcttgtgatctgccctcctcagcctcccaaagtgccaggattacaggtgtgagccaccacgcccgcccacattgtgtaaatttatcacctgttaaggcagaaaatgagctttgtaaactagtaagcagaattatttctgctccctcaaggtgcacacaagtaacctcagccttaagtatgttcctttgattcttcttaacagtggtgaaggcaaggggatagttttttcagccagcagtggggttgcaggtagaatcacagagctttgctttgaaccctaactggacagatcattttctgagtcttaatttttccttttccatttctaaagtgaagccagtaatacctgccttatagggctgttgcaaggatggaatgagatgtattgacagcagtaaactataaaatacatagtttatataataaactatgaaataaatacaaaaatataaaacacggggtatgaaggccatctaagggtttcatgagcaaggtgtattcagccttaagttgaggttttgcattatttttggttaaatataaagaccagggtaatcatagaactgccaagcagaaagaaatgtagaatgtagcagtggtgtggagacccgtggctgacaggtggtggtcttcatataggctgagggacaggctagatgcatgtcaagtggcagctcaggttggaagacaggagttggggatgtgagagtccaggccagggtgaagagaagtggctgggaaggcagccaggctcagctcttaggaggcagagagctgcaagcagagggtgggaccaggtctcttttttcaacccagtcttgagggatgggggcaaagtcaacctagacttgatttagagctagttctgttcacttgatcatctttattgggccttcaggctcctagaagactaccgtgatagactgactagtggtctgtaaatggtttttattaaaaaaatcacataccctttttgataaaacatgtatttgtttatacactttaaatatattgtgtaattatataatacattcacaaataagaattttaaaagaatgagataaaaaatttaaagtaggccaggcgcagtggctcacgcctgtaatcccagcgctttgtggagactgaggcaggcagatcacgaggtcaggagttcgagaccagcctggccaacatggtgaaaccccgcctgtactaaaaatacaaataattagccaggcgtggtgacaggtgactgtaatcccagctactcaggaggctgaggcaggagaatcgcttgaacctgggaggcagaggttgcagtgagccaagatcaagccactgcactccagcctgggcaacagagtgagactctgtctttaaaaaaaaaaaaaaaatgaaagtcaatgaaagttgtaaagatttcatcctgcacttcagtggctgatgattgccttagacagtgggtctgggagcatcctggggagggcatgtgtcctcaggggtctctggggaccagcctcagcacctcacttcttccagccacagagacagaacatcagaaccatccttcatggagcttcccaactggcctgttgaggtccctgctctgccaacccctgctgctgctctgcacatgctggctgtgtccagagctcggaggcccctggccccagcaatgtgtgatgcctgcacatgtggcttggctgcagcaccttgagaagacttaaatattctagtgacattggctgaccagggcactgacagcctcaccttagtatttgaatcagttctgaggcaatatctagtgtcaagagaaaaatgaactgtttttcccaaaccagtcaatctttccagtaattaacatataaaaaagcctcatgttaagtgagagcagtgcagtgtgtggttataaagaaataagactaatgtttatgacatacataggtctgtaaaacacagacatatgttattttatggatgctattatgccagtagtgataacagtaacattagctaatagagattaaggtaagcctttccacgcatactatctcatttaatctttgcaccaactttgtaaatgtaggaaatactaatctgttcaacagatacttgagtgcccctatggtgttggtgctgtgaggatacagtgtacaagaagacagacaaaggtccctgtgctcacttgagcagctcacagtgtagtgggaagtcaggcatgcccccccaccgccccagggatcagacatagtggaatcataaagaggggtgagtaagtaaggtcccatgttagagctgcaggatgggatgaggtcatcaagaaatgcttctggaggggccagttgggctgagacagaagctggggcatggagggcagggtggcagcctttggagagaaaaggtccgtgttcctggacagtctatgggttgtgtcatcctattaagtggctctttacgtgtacttattttctccccaggtagatcaaaagcttctggagggcatgttctgtgtctcattccttcatgtctttcgctactccttccacaaaatagtttccagtaaatgttagttgacatgaattggtactcaaatggatggttaaaagatgtgtattgtgtaagacaccatatcttccttgtaatttttttgggggtcaagcaacaaacagttattgaggctatgatattagaaattaaagacaagctttagcccatttgctctttaaggaactcagaatctgaacatagaacagccagcagagcaggttgaacaagcaagtacaccatgtcggggttccccgactacaccatgtcggggttccccgactcccccatctgtggagctcattgggtcaggcttcccaggaagcacatgctgcactgcttggggtggccaggcatgcagatggcagatggggtgtgtgcagaggcttgtgagtggggctgcagagaaacaagctagtggagaggagattggctggcttgtgtttctctagtgccgtcatgtagaaacgctggatttgggcaagtgattgacagggcatgaacctctgtcctgacatcctgcctctgtcctcaggtaatatttgttgagagttcaagggcataatatttcagagcccagcagtctcacgcggctctgctgcgaagtccttctggtgaactgctcttccatccagcctctcctgtggccagtaggggagtgcagacacaacgtcgttaatagcaacacatttttacaaaatttaccttttcaaaccccaccccctagaaaccgtagcttctttaatgtcccgctggctgtgtgaaaaacaggaatttatgtaacaagtcctgcacagcaaaccttttcctgttcggaaaaaattttaattgttggcaaagttaggaaacagctctgttactcaaagagcgacctgaaatgtcctcttagaaaaatatgtaatatgatgttttgataagtaggagactgctgtggcttttttttttttaaagtctaaattagtatatgtcccacctgagttagtgaacgcttcttgaatgttttaaagatttccttattatgtctcctgcagtctttttaaaaatgacccccagctgggcttgccagtgatctgacaggcttatcatgaatgttagagagcttcaccccctctccccaagtcaatgcaacaaccaggaagcttctatctgggaagatctttcttccccctttatcattaactaaatgtgacagggacaggagtcaagcttcctctcctccagagatttcatcggagcttatctgtgtgtctattgtgttcaaagaacaaaactgtcatgatggaatattgtgcaaatgcctggacttccagtgtatagaaaatgtcagggtcagactgcagggctgcattccagtgctaccccaagtgcgggcctgctgatcttaaggaggaattaagaactcggttcggctggggttggtgggtacagcagacaaggctgtggctctgtgagcatacatgtgtgtgtgtggcgccttcccataggaatttggggatcttaggggaatgcaataggatgggagggaaatgtactccctggcctcttttagggattcttgtacctactctaagcccctggccctcctcacagcgtgtctcgaggtgagggtagatcttgggtgtggaggaaggtggggattcttgggaacaggagacagtcactgccatcaccacacacctgctccgttccagccgggaatctggggctccggtggtgtcttccccgctctcacacttcactgtatgctctggcaggagggcttgtcacgtagctgctgtgttgaaatctttaggcggaatgcagtacagagagtcagagggcgttttgaaatgtggatttctcagccctgactgctgggccttaccctgacttttgcatctccctttagaaagtgagacccctccattttctctcttctaccaccttttaatgagagaagacttctctcccagtttgtgttggagccaggcctcatcctgctgtgcagaggctctgctcaggcgcagtggttggcactcgggcccgggcgtcccatgtcaatggcatgaggatgtgggcgctgtggctgcacccctgggtgaccacaaatccagccagagcctttttgtggttgagaagaggggccgcagagatgcagggggcatggtcagctgagccttgcatccagttggcagaggaggccaagaaagctgggagactgtgcacattccagggtcttagggcacccagaatcccactccttgggagcagacctctgaggaaagaggctgctgaatgaacaaggtgtagtggctgtgtgccctgtactgtgctgggggccagaagctataagacaaggcccttccttctggggagctcacagcgtttccctcgtctccttttccacgtgtcccacggactcccctgaacaccatcttactctgtgttgtagaggaggtgaatcaaaccatggctttctcatctgcagcctggctctggtgtttctgctgaaacttggagagaccacctctggcccctttcaccatatatttgcagttgtgggtttgtatctgtactacttctaagctcctatacataccacactgaataggaatagagaagcaggactttggggcgcaggataccactattctaagttggggtctaatattcccttcatggtgactgcttacatgccaggcaccgctgagcatttttatgtatctcatttagtacatgtaacaaccctgataaggctctgtaatttagccctgctttacaggtgaggaaacttaagacacattaggggctaggcagcttcccaaggtcacctaggtaagtaagtagcagagccacccaggaagtactcaaaagaaagattgttggtttttcttccctagttggcctagggatgataaacatggcatgattagttatgaagctgcggtagcttgagagttagagctctttgcgttctctgtcatttcttcccatcccaggttgtctgtttggacagtgtagcccctggctacgtggaggtgtgtcatggagttagttggtgcatcctgctcatactactggtcattggtagaactggagggtaggggcactacttgaattaaaaaaaaatttcttttggcaggtcagctttctcaaatacaaaagcaatgactctgttttccttacattcacttgtatttgcttaatgggctttaaaggtgtgaatgaatccaagtcttattaatttgggggcctttaattcttgatcagctctatatttctatattctttttttttttttttttttggcgacagagtgtttaactcttgttgcccaggctggagtgatctcagctcaccgcagtctccttctcctgcctcagcctgccaagtagctgggattactggcgcctgccaccacacccgactaatttttgtatttttagtagagatggggtttcaccatgttggctaggctggtcttgaactcctgacctcaggtgatctgcctgccttggcctcctacagtgctgggattataggtgtgaaccaccatgcctggcctatattctatattctatatattctatattcttttgtcttttttgtttctgtaagtatgtgggcccagtaatataaaacttctttatgtaaatggcacaggttcaaactgaagagaattggcagtagttttaaggatagtagaatggaaggggtttttgatagcactttgatacagagtactattgtagctaagcaaaatttaagcggttattaaaaccaattcctttgatttttccataaaatgtagctgtataaaagaaggtatttacaatactctttattaaattttgtcccttcattaaattaagatatagaatttttttttttttttttttgagatcgagtctcactctgtctcccaggctggagtgcagtggcacgatctcgcctcactgcaagctccgcctcccaggttcacgccattctcctgccccagcctcccgagtagctgggactacaggtttgcaccaccatgcctggctaattttttgtatttttagtagagatggggtttcactgtgttagccaggatgctcttgatctcctgatctcatgatccgcttgcctgggcctcgcaaagtgctaggattacaggcgtgagccaccgcacccagccacagatattgtttttaagataagatactatttattcctgtgctatttgagatcttttgtagtggcttcagagccattaggactgttcagatggaaatctgtagcacacactcttaagattttttacttgttttccatgtaatacatgtagaataggaagttttgcaagcagagaagtattgtacttctaataagatgttttgccttacagaattcaattcgtcataatctgtccctacacagcaagttcattcgtgtgcagaatgaaggaactggaaaaagttcttggtggatgctcaatccagagggtggcaagagcgggaaatctcctaggagaagagctgcatccatggacaacaacagtaaatttgctaagagccgaagccgagctgccaagaagaaagcatctctccagtctggccaggagggtgctggggacagccctggatcacagttttccaaatggcctgcaagccctggctctcacagcaatgatgactttgataactggagtacatttcgccctcgaactagctcaaatgctagtactattagtgggagactctcacccattatgaccgaacaggatgatcttggagaaggggatgtgcattctatggtgtacccgccatctgccgcaaagatggcctctactttacccagtctgtctgagataagcaatcccgaaaacatggaaaatcttttggataatctcaaccttctctcatcaccaacatcattaactgtttcgacccagtcctcacctggcaccatgatgcagcagacgccgtgctactcgtttgcgccaccaaacaccagtttgaattcacccagcccaaactaccaaaaatatacatatggccaatccagcatgagccctttgccccagatgcctatacaaacacttcaggacaataagtcgagttatggaggtatgagtcagtataactgtgcgcctggactcttgaaggagttgctgacttctgactctcctccccataatgacattatgacaccagttgatcctggggtagcccagcccaacagccgggttctgggccagaacgtcatgatgggccctaattcggtcatgtcaacctatggcagccaggcatctcataacaaaatgatgaatcccagctcccatacccaccctggacatgctcagcagacatctgcagttaacgggcgtcccctgccccacacggtaagcaccatgccccacacctcgggtatgaaccgcctgacccaagtgaagacacctgtacaagtgcctctgccccaccccatgcagatgagtgccctggggggctactcctccgtgagcagctgcaatggctatggcagaatgggccttctccaccaggagaagctcccaagtgacttggatggcatgttcattgagcgcttagactgtgacatggaatccatcattcggaatgacctcatggatggagatacattggattttaactttgacaatgtgttgcccaaccaaagcttcccacacagtgtcaagacaacgacacatagctgggtgtcaggctgagggttagtgagcaggtaagttcaccccaatatcaaaagaccttttgaaaaatagaacttaaaagcgaggaacacagtaacttgccatggttagcacatctttgatgtcaactgactgtcccttgcagagagggatcttttatcattcattctctgtcctttttgcagcttacagttttccttctgagcttacacagaaggaagcttcctttaactgctttaaagatttctttttgacagttcgatggctgcatctttttagtagctcttcaataaatgaatacatttgatataaatcaaatgctgaagggttttttgtaaagtagaattttccccattgaatgattttagagctgtttgagaaagctctagctttttgcccctaagtatgtctgtcactcttaacatgttaagttgaattgattttaatttggctatattttcattgtgtgtgtatgtgtgtgtgcgtatgtatgtgttttttcctaggttacacttaaaagtacttcagattgtctgacagcaggaactgagagaagcagtccaaagatgtctttcaccaactcccttttagttttcttggttaaaaaaaaaaacaaaaaaaaaaaccctccttttttcctttcgtcagacttggcagcaaagacatttttcctgtacaggatgtttgcccaatgtgtgcaggttatgtgctgctgtagataaggactgtgccattggaaatttcattacaatgaagtgccaaactcactacaccatataattgcagaaaagattttcagatcctggtgtgctttcaagttttgtatataagcagtagatacagattgtatttgtgtgtgtttttggtttttctaaatatccaattggtccaaggaaagtttatactctttttgtaatactgtgatgggcctcatgtcttgataagttaaacttttgtttgtactacctgttttctgcggaactgacggatcacaaagaactgaatctccattctgcatctccattgaacagccttggacctgttcacgttgccacagaattcacatgagaaccaagtagcctgttatcaatctgctaaattaatggacttgttaaacttttggaaaaaaaaagattaaatgccagctttgtacaggtcttttctatttttttttgtttattttgttatttgcaaatttgtacaaacatttaaatggttctaatttccagataaatgatttttgatgttattgttgggacttaagaacatttttggaatagatattgaactgtaataatgttttcttaaaactagagtctactttgttacatagtcagcttgtaaattttgtggaaccacaggtatttggggcagcattcataattttcattttgtattctaactggattagtactaattttatacatgcttaactggtttgtacactttgggatgctacttagtgatgtttctgactaatcttaaatcattgtaattagtacttgcatattcaacgtttcaggccctggttgggcaggaaagtgatgtatagttatggacactttgcgtttcttatttaggataacttaatatgtttttatgtatgtattttaaagaaatttcatctgcttctactgaactatgcgtactgcatagcatcaagtcttctctagagacctctgtagtcctgggaggcctcataatgtttgtagatcagaaaagggagatctgcatctaaagcaatggtcctttgtcaaacgagggattttgatccacttcaccattttgagttgagctttagcaaaagtttcccctcataattctttgctcttgtttcagtccaggtggaggttggttttgtagttctgccttgaggaattatgtcaacactcatacttcatctcattctcccttctgccctgcagattagattacttagcacactgtggaagtttaagtggaaggagggaatttaaaaatgggacttgagtggtttgtagaatttgtgttcataagttcagatgggtagcaaatggaatagaacttacttaaaaattggggagatttatttgaaaaccagctgtaagttgtgcattgagattatgttaaaagccttggcttaagaatttgaaaatttctttagcctgtagcaacctaaactgtaattcctatcattatgttttattactttccaattacctgtaactgacagaccaaattaattggctttgtgtcctatttagtccatcagtattttcaagtcatgtggaaagcccaaagtcatcacaatgaagagaacaggtgcacagcactgttcctcttgtgttcttgagaaggatctaatttttctgtatatagcccacatcacacttgctttgtcttgtatgttaattgcatcttcattggcttggtatttcctaaatgtttaacaagaacacaagtgttcctgataagatttcctacagtaagccagctctattgtaagcttcccactgtgatgatcatttttttgaagattcattgaacagccaccactctatcatcctcattttggggcagtccaagacatagctggttttagaaacccaagttcctctaagcacagcctcccgggtatgtaactgaacttggtgccaaagtacttgtgtactaatttctattactacgtactgtcactttcctcccgtgccattactgcatcataatacaaggaacctcagagcccccatttgttcattaaagaggcaactacagccaaaatcactgttaaaatcttactacttcatggagtagctcttaggaaaatatatcttcctcctgagtctgggtaattatacctctcccaagcccccattgtgtgttgaaatcctgtcatgaatccttggtagctctctgagaacagtgaagtccagggaaaggcatctggtctgtctggaaagcaaacattatgtggcctctggtagtttttttcctgtaagaatactgactttctggagtaatgagtatatatcagttattgtacatgattgctttgtgaaatgtgcaaatgatatcacctatgcagccttgtttgatttattttctctggtttgtactgttattaaaagcatattgtattatagagctattcagatattttaaatataaagatgtattgtttccgtaatatagacgtatggaatatatttaggtaatagatgtattacttggaaagttctgctttgacaaactgacaaagtctaaatgagcacatgtatcccagtgagcagtaaatcaatggaacatcccaagaagaggataaggatgcttaaaatggaaatcattctccaacgatatacaaattggacttgttcaactgctggatatatgctaccaataaccccagccccaacttaaaattcttacattcaagctcctaagagttcttaatttataactaattttaaaagagaagtttcttttctggttttagtttgggaataatcattcattaaaaaaaatgtattgtggtttatgcgaacagaccaacctggcattacagttggcctctccttgaggtgggcacagcctggcagtgtggccaggggtggccatgtaagtcccatcaggacgtagtcatgcctcctgcatttcgctacccgagtttagtaacagtgcagattccacgttcttgttccgatactctgagaagtgcctgatgttgatgtacttacagacacaagaacaatctttgctataattgtataaagccataaatgtacataaattatgtttaaatggcttggtgtctttcttttctaattatgcagaataagctctttattaggaattttttgtgaagctattaaatacttgagttaagtcttgtcagccacaatgttgtcattggttcaaatctggtatttcctttggaggaaaaggggaacagcccctctgggaccaaactatagtcccctgagatggggaacaagtacaatccttgataacaatcctggaatacttcatctttggaatgtctgaaagtacatccggttcagtaattactaggcatattaagtcttatgttagaacagactctgctaaaggtaaaaacaccttgagggcaagttaggagggtctggctaggaggtcacagagcagatgcggtggatggagtggcagaaccccatggctaaggtcataagtgctcctccagtcactactgcacaccttgctgaagggggaggatcagccctcctttaagtggctgtaggtgggaagtttatgtttgctcttttcagaagatgtctgaggaatgagccaggattagattaagatggttaagatgcattttaaaatcattgtgaagcccactttctcctaacttctgactttctgaccagacaagtgaatgagctggagaagcaaggaaaaagattattctgtttatctgtgtagacactgagggtccatcccactttcagagtattttaaaatttacccacttttggaagtggaaaccctttctttaaaagacgtgatagccagaagcccaatgtatagaagagatgaaagtatctacccccatcccctggggctcatgcacagttcagtgtgaaaactgtagatgtagtccaaatgaggaaaaaccccttgcttataccctggaactctaaccagctagcctttcataactctgcacatatatacaaaactgcacatccaatgtcattacttgaggccagtttccaagttttacattaattgataagcaacatatagcaggaaggtttccctgggagacctcataggaggagctcagtgttagactttgtagccggacaggcttccttccttggacagttatctaggcccttgatgtgaccagagctgatagtagaatcaggatgtgtacctaggcttgtttcttgatctgtgaatcggccacactggaagacctttgccttggctattgtttctccatgtttcaggtgacctataacaatgacactacactggttggtgggttaggtaaggtaggtggagggctgttccgctggatacaccatgtttaaaagtggcagtctctgaagcagacatcatcacgtacacatcaaaccttgtatcatctagtggtgctcattctgggcccaggtgtatgaaggtatattcctggtaggtttccttattacagtttgttgttttggtataaaagttgctttggtgagaaatagtttaacacttaaattataccagttacatttattgagaaaattattgggaaaaagcggattggggtacaagtccacttttcaaatcatagactctggggtgttttttagtttaactagaaaaaaatggaatttccagtggactggaaagggaggtaactatatgcagggataaaggagaagaacaagtagtcctgggtggtggtgggtaatacatcaggaaaccagacgtgaagtggagccgtaggccttgggaggaagctatggagtgtcgtgggggcatccgaaagctagagagcttttgaagccaacggggagagggggctttctgttcaagtgcttggctttggtgatgtggctgtgagaggagggaactctgtactgagaaggcattcacctgttagaagaagcagagtaaaacagttggggccagcttttcttccttgactggtggcaggacacttttccacccctaggccctggcccccatatttccacgaactccaaggctgaaggaaatttcttgcctttagtaccttacttatgccatatctccccaaagtgactcttgttttcttggaagccactggtggaaagtagagatttacatccttcaggaagaaggtcgcttgttatttgtcctttacatattaacttctgtgagcttaaatccccgaacaagcaactttgagaaagaattcctacaaaaacatattgcagatggcagcataggagccctgctgtgttcttgtagttgctagagtttctgcaaacatacttggcttgtaaagtactaaaattgctgcccaagtcggatgaccttagatgagacagctgcttagaataaggctcacattttaaaccagatttttctcccctgatgaattgggatagagaggaggtccatttgcagtttagcacttggtcccagaataagccagagatgcccacttcttagtctgtgctggtgtcagggacacttgcagtgtttgcagagtgggaagctctgatgcttgggcagcaatttccccacaggtaaattgaggataccttctgttacctgtctcacaggtttgataggagattagagcgatgaggtaatgtctgcgaatggtttcctgtgtcagggagaaagcctgcacagctgagtggtgtcaccttaggtaatagtaggccttgggatgtttccgtagtggggcttctgacagcatctccctgcaggataagtgagagaactatttggttcatccccaatgtttttctgttttttgtttgttttgttttgttttgtttgagacaaagtctcactctgtcacccgggctggaatgcagtggtgcaatctccactcactgcaacctccacctccatggtttggttgattgtcatgctccagcctcccgagtagctgggactacaggcatgcaccaccacgccaggctaatttttgtatttttagtagtgatggtgtttcaccatgttggccaggatggtctcaaactcctgcctgccttggcctcccaagtgatctgcgtgccttggcctcccaagtgatctgcctgccttggcctcccaaagtgctgggattacaggcatgagcctccgtgcccggccgccagtgtttttctgctttcgtatttgctgtgtttcgtttcttaagcaggagagtgtagacagtttacagggccatttccaagagtgaataggcctgtttttcttcagcaactctaaagtattatcagtagtaaaactgtaaacctatatctgcccaataaaaactagtattgatatttattccccaagaagttccccaacatggacccgtactaaggaaatttacagacatttaagctttcttgaccttgacctcatcccagtctagaatagactctgtgggactccatctgtaagatagggagagaggagaggagaggaaaagcctgaggtcgatggggccacagtagtgtgtgttgcagcccagtcacctggtccacaaaaatgaatggttaaacttgcagaagttttgtgagccaattttaaataccttcattatcaacaagtcagataaactattatatttaaaaacaaagatagtaagtcctcaaaactcttcactttgtaattattgtattcatgttagtcttgtccaccatcgaggttgttggcagcgactgtgttgcatggtgaggatgctgtgtaatggtgtgctaccataactgaccccaggtgtgtctgctcactgcttgaaagccagattcgagagacaagtgttggtgggaggaaaagcaggattaattggaaagccaggaaaccgagaagatggggaactagccttctaaagtaccatcttcagacagtacaaattttaggctctttttatgttaagggcagaaggaaggggaggggattgagatcaagaggtaacagataaccaccgacatctgggtgccagcaagtgttcaaggaacttctttgtccttggtcaggtcacaacgctcctataaatctttaacaaaaacatagttgtttacatacttctcctttaatcccagagttagtttttaaaactacatgattgctgtttttgcatattaatagtactctaaaattatccttgcctatgtgcagaaatgggtaagggccacttaaaccaaaatggagttagttatgttagctcttgtgctgtttcactgttacactgctgctgtgctgacactaagcagagtttcagcttcactaatataatttgggtgagagtgagaaatggtttaacagttaaatcacatcagttgattgagaaagtaaatctgagaaaaaaaatgcattgggatgcgagtccatttgtcaagtcctggttggattgccaccatatgttggctacggataaaagttgaccataaaaatcagtgaaagaattctgtgagaatcaattgacctaatataatttacaatagagagtattgtatgttttattatttgtaaattgttactcatcttttatatcagtaaattcttaatttatgtacgtaaatacaggcacacgttatttccccacagagcaggttgttaaacattggccaacacatcaccaactgggtgtatgaaggcattaaaggactaatgattttggtgacaataacaggcagaatgggagtaagggaaagatagaataggaggttgagggagggtctggggtgaggtcatggcagcaggtgtctgagaagctgtgaaggccagggccctagagtagaagaggttaggggatgatagggcctcaagattgaatgtagcatgcaaattagatttcagagctaaccaagggacttggggtggagaggagtcacatttaagtgccagtgcctttaatttgggggagaaatgcagagccagtagctgctagatgtcagtgactgggaagggcacacagcaggttaggctgatgctgtaagcatggatacagcttttaacatgagggtgcaagaggaagattctggaactggaaaaggaatgcagaggatgccagttctgctttttagactcatttttgatgggaggaattatacctgcatactggggttactgtggaaattaaataacctgagttaaccccctatggtagtgcttggcatatagaaagggctcacaaaatgagagcaatcaaatgttctgatttgcttaggaaaagatgttgtcccagcacagttatggttaagttcctcttgttactcaaagtgttcaggtttgggtgattaattatatgttcaccctattaacaaatgactgctttttaattacttcctggaaccctcacctcacagtggacataccaagagcacccagtgggtgagaggactcagaggccccctggaagaatctttcacaggctggagggttattcttctaaaggaatgttagcctggtgtctcagcataaacttgaatctatgacacatactaccatctgaatgtttgtgtacctctaccgccccatttaaatgttgcaaatgttgaaatcctgacccttgtggtgatggggttaggaggtggggcctttgggaggtaattcggtcatgagagtggagccctcatgaatgggattagtgccctcacaaaagaaacccaaaagaggtacctagctctaggtacctcttcctagaaagtgccatctgtgaaccaggaaagggagaggccttggtcttggatttcccagcctctaaaacagggaaataaatttctgtggtttctaagccacctggattatggtattttattatagcagcctgaaggtactcagacagcatgcaaggtccttcccaaccaacctttgcctttgcatctccaccatatgcaccagtcacactccattcccttttatgcttccagcctttttgcatgctggaaggtctgtttatccagaatgtctgtttatctggaatgtctttctcctcccttccttatcaaagtccagctcaaagccttcccctatcattaaagtccaccccaacccctagtgtcagagtagttacacaggtgaactggaagcatttaagactcctttcccaaatatagccttgtggctgtgtttagccctggctaaatactaacaattctcctgaggcagccctgtagccatcctaacaagaagtttggagccaggcctgcctgactttgggtcatcaacagccttccactgagcctgaagcaactggccagtgcagttgaccactggacacagccaaagacattcttctttggtgagccagcccacatctgccaacattccaccaaattaaaagcagaccaagaacccccaagtattttgacaagtctggagctgctattacttcaaccgaggcaagtacaatggcaagagagaaaggtatgggcaatgatgaaatgtctaaaagggatcattggcctgccctccagccagccatctccagggctgcagaatcctttctttacatatagatttttctctgggctccagggacagagtcagccctttcacttagctcctacttccaaaattgccattaacaagactgaaatgccagtttatctactttcccccagaaagtgttgcatgtctatagacacagctaggatgtgctcatcttgggacagttatagtctctgagtttgttcgtttattttttaacaagacaactggccacccttaattaaatagatatgtgatttgttttcaagccacctcatctgagaaggacaccgcagtgttatttgtagtttttgcctcggttgtgtgatgggggtgtgtctccatctctccccagcctaatgggattggataaagtatgtggatttcatgttctgacttttaaaaaaaatttaatttgaaacacttgaaatattcaaatatttttgaaatattttagaattaaatattattttgaaaggaaaataattaattctcctttgcaagacagaaaagtttttcctgttttatttccctacacctaccaaaacaatgtcttggtgaaaaggaggacctcctgaggtcaagcaattctgtttagaaataattggaagtcgtgataaaacataccctgaattggttgggcacagtggctcacgcctgtagtcccagcactttgggaggcagaggcaggcggatcacttgaggtcaggagttccagaccaggctggccaacacggcaaaaccccgtctctaccaaaaatatgaaaattagccaggcgtggtggtgcatgcctataatcctagctactcgggaggctgaagcaggagaattgcttgaactcgggaggcagaggttgtagtgagctgagatcgcaccactgtactccagcctcggcatcagagcgagactccatctcaaaacaaaaacaaaaacaaacaaaaaacctcccaaaaaacctgaatagaaaacttcatgtgtacttgtaaacacatcttctgagactcaaaagttcttagagccctatgagctatattttttaaatcaatattatctgtaagtttctagttcccctctgactccatttttctgtcttcaataattgttattccattaaaaacatggctataattttcaaaatcctggataggactggctggaagcatttaacagctgtatggaatctcatctaaccatcatgtgccttttttttggaaacaacaatctgagcaattgtccttgtcttttgtaagaaaatcacatgattaaaaaaatagatgactagcaatattgttgtcacttggttactggcaggagtagggagagggaggaagacataggaaaaatgctttcttggatccctcagccacaccaatctgcaaacctttctggagtaaataatttcctttgtcatttctgaataactaaaaaaagacttcagaatgtttccaggcctgggcattctatcatgtaatacttccagcatttgagttacctttccttgcttaaagagttggctcaaaactcagccatgttccccactgctggatctgagtgttggggagactgctatgaattgtatgaatgaaagttctgtgttcgttacggacaataatggcccctctgggattagaagacatttgaatcagctcccaaaggtgctgctttgaccttagtaagcattctgaaaccaagcttcccactgcctccaatgtgtcatccagaaagagagctgcaggcttacccctgacagggaggtgcctgtcatcttgtagactatagagaatagaggccccatatatgaaatgtttggaagcagcaaggctggacattgaccagcataaagcaagtgttggaatttgttgtttctctgcaaaataagctgattttttttttccagggtacttctaagacttgtagaagaaaaactatgattaagaaaagtggatggattattaagaaaggctttttattcaaaaggttttgtgattttaatagcgctttgcatttataataccttccatccaaggataccagccacctctgccaacgctaattcctcagcctctccttgaatttaaaagagtagagcaaacctattcgccgtggaccatgcagaagtgaaaagtgagtcccctgggcggggggagtttagttacccaagaccctgagggaacctgttgtaagggaacttcagagataagactttctcaaaatgtgagctactaactgttggcaacagaattacttggaaagatttgtaaaaaatgcaaattccagaacctctgagaaggagaaacagaatcttggatcggggtgtgatggtggagaaatctatattttaattattccgggtgatttttatgaacactgaaatttgagaactgctcttagactacagaaatgctgtaatattttctgccattcattcattcaataattacatttacctactgagtatccgctgtgtagcaggccctatgcaagatgctggggacatcctatgtggtgatcgggacagacgcgctgtctttcctcatgaggcttgcagtcttctgctgctctttagtgtgtagtgtgggttagcagaaagatgtcatgaagtattctgtaaaaataggctccttggatcaaataaatactgggctgatagcaggccatgaaactgaaaatctcatcattcatcagaggcttttccctgcctgacctactgtgggtgctgcataagtgagttggacagcctggcctcctgctccaggagcttgcgcatctgggcctgctttggcctctcctctggtcttgccagcacaaggatcaatccctgaataacactgtggagtggcattgaaaccgtttgagcgaaaggcagatctggaaaccggcttatttgatccggggggaccacatggctgagttaaatgcatccaggtctgaggaaaataacaacccagcccccgcggagggtctgttttccattggaaatgggcctctcttttcttaaagctgcgaaagagaagcaactcctcttgcaagatctttgagggagcataagctagacccagttgttggtgctgggatgagtttcccatactccaggctgggcagacaccaccttgctccaggccaactccagggcagaggcagctccagggcaacttccaaacccctggtgagggagcagcagccgaggtgggagccgcctggggcagggccagacactccatgatgataacactttgacacttcatttgggtggtgtcctcaggccgagctctgtttcatgctacaaacgctgaggaacacttgaaggaggatgcctggattttttgtatgttgtttgtaaaatgtcccccaaagtggacataaatcaatctctgttgcaaaaagaatcaaggatcatatccaatacaatctgacctttcctgatgcctcaggggcgtcattaggaacatctgtgatggcgcagagttggtgttcagcgatgtcctcagggctgtggaggtcgctcctgtttttggactctgtcctacccccttcccttgccttctctctctcctctccccccttccttccctccctttctgccttccttcctctcttcctccctcaatccttccaactccctactctctctctgtctctcacttattctttatcatggaaaatttgaaacataaaaaaaaggtagaaagaattaaaaatataataaagccccatgagttcttcttctttttttttttttttgagacagagtttcgctcttgttgccgaggctggagtgcagtggtgtgatcttggctcactgcaacctccgcctccctggttcaagcgattctcctgcctcagcctcctgagtagctgggattacaggcatgcgccaccacacctggctaattttttgtatttttaatagagacagggtttctccatattggttaggctggtcttgaactcctgacctcaggtgatccgcctgccttggcctcccaaagtgctgggagttctccttacttgggttgaataattatcagctcatggctaaacttgcttcatacacagtcaagcgtcgcttaacaacagggatgtgttctgagaaatgtatggttaagcaattctgttgttacgtggacatcgtagagtgcacttggacaaatctagatggtatagcctactacacacctggggtataatggtacagcctgtggctcctaggctacacacctgtacagcatattactgtactgaatactgtaggcaactatagcacagtggtatttgttatctaaacatatctaaacatagcatagaaaaggtacagtaaaaatatggtataaaagacaaaaatggtacacctctatagggcacttaacatgcatggagcttgcaggaccggcagttgctctggtgagtgagtgagtgagtggtgagtgaatgtgaaggcccgggatattactgtatacttctggagacttgatagatgctgtgcacttaggctacgctacgtttgtaccagatagtttccctcttcaataataaattaaccttagcttactgtacctttattaacttgaaattttttttggctttttgactcttttaacaacacttaatgcatacattgtatagctgtctaaaatactttctttgtatccttattctataaggttttttctattcttaaattgtttaatttttttactttttttttgggtggagacaagttctcactacattacccaagttggtcttgaactcctggcctcaagcaatcctcctgtcttggcctcctaaggtgttgggattacaagtgtgagccactgtacctggcctatatttttactttttaaatgtttttgttaaaaacgaagacacaaacacacacattagcctaggccttcacagggtcaggatcatcaatatcactgtctttcgtctccacatcttgtcccactggaaggtctgcaggggcaattacatgcatagagctgtcatctcctattatgataacaaggccttcttctggatacctcctgcaggacctgcctgaggctgtcttacagttaacatttaaaatatatatatatgtagaaggagtacactctaaaccataaaaaacagtaacatggtcatttattatcattatcaaggattatgtattgtacataattgtatgtgctgtacttttgtatgactggcagtgcggtaggttggttcatacaagcatcaccacaaacacacaagtatgcattgctctagggcagtacaacagctaccatgttaccaggtgatagacaatgttcagctctattatcttgtaagatcactgtcatgtgtggtccatctctgaccaaaacgttatgcagtacgtgactgtatcctcatcctcaataatccttggttattattctagaatttgaaataaatggaatcatatcatttactatgtacatttttttgctcctggcttcttttacttgcgtattatttttgaaattcgttcatgttgttgcttgtatcaataatttggtcctttttatttatttttattattattgttttgagatgaagtctcattctgttgcccagcttgggtacaagggtgcgaactcagctcactgcaagctccgccccccgggttcaagggattctcctgcctcagcctcccaagtagctgggattacaggcatgcaccaccacacccagctaattttcttatttttagtatagactaaaatttttcttatttttagtctatactaaaaattttcttatttttagtatagactatgttggccaggctggtctcaaactcctgacctcaagtgatccactcacctcagcctcccaaagtgctgggattacaggcgtgagccaccacgcccagctaggtcctttttatttttaagtagtattgcaatgtgtagatataccagttggtttatccattcttctgttgatagacatctgggctatttccaatttttgactattatggataaaggtgctatacacacttttgtacacattttttttgtgggcattatattttcatttctcttgagtgggatacttaggaatgtgattgcaggatcataggtatattcaattttttaagaaaatgccaaatggttttccaaagtggctgtaccagtttacactcccaccagcaatgcatgagagttctggttgttccatgtcctctccaaaatctggtatttttcatcttgttaattttagctattttagtgtttgtagtggtatcttattatgattttaacttgcatttccctgatgattatgatggtgaatgctttttcatgtgcttattgaccatttgtatgtcttgtgaagtgtctattcaagtattttatccatgtttaaattgcattgtctttttattattttattattttttgtttttttattgagttgtaggaggtctgtatatattctgcatataagctataggaatgtatgtgtatataagtatgtaatatctttgtacatgatatagattagatataatatatattcagacacaggtgttgcacatattttctcctaatgttacctattttcttgagtgccttttgatgaacaattttaaattttgatgaagttcaatttattactttttttcttttgtgatttgtgctttctgtgtcttcatcaagaaatctttactttcccctgtattctcttatgttttcttctaatgacattgtgtttatatatgtgcacagaaactaaaaaaagcaacaacaagaaaagcataaccacaaaacgcagcataatacataaagaataaaatttcttaatattatcaaatacccagttagcacaatgttcacattttctcacttactttttaggtttttcttatgatttgttaatacaaattagaatccagataacatccatattataatacattgcttttttttttttttctgagacagagtcttattctgtcatccaggctggagtgcagtggtacaatctcggctcactgcaacctccgccttccaggttcaagcaattctcctgccttagcctcccgagtagctgggattacaggtgcacgcctggctaatttttttgtatttttagtagagacagggtttcaccatgttggccaggctggtcttgaactcctgacctcgtgatctgcctgcctcggcctcccaaagtgctgggattacaggcgtgagccattatgcctggcaatacattgctttttttgatatgtattctaagagtttttcttagtgtacaggtcacccccatttttttttttggtactgtttttaagaaactgtgtcatttgtagcgtgtctcatagtttggactttgctgattttatcctcatggtgccattagtatatttctctgcccctgtgtaacctgaaaactagatctagaggcttggtcatatttaggtccagtcttttttttctttttttttttctttcttttttggagatggagtcttgctcttgtcacccaggctggagtgcaatggtaagctctcagctcactgcaacctccgcctcccaggttcaagcgattctcctgcctcagcctcctgagtagctgggattacaggcacctgccactacacccagctaattgatgtatttttagtagagacagggtttcgccatgttggtcaggctggtctcgaactcctgacttcaggtgatccacccaccttggcctcccaagtgctgggattacaggcgtgagccactgcgcctagcctaggtccagtctttgtcaagaatactttatagtattctgcgactagacagggtgggaagcacatgatgtccacttgccttttgtatgatattagcagccattgatgaccattgttattgtcattatttcatgaagattacaaaatggtgatattctaattctaccatttcttcttcctttttttttgtttgagacagagtcttggtctgtctcccaggctggagagcactggcgtgatctcagctcactgcaacctctgcctcctgggttccagcttcaagtgattctcgtgcctcagcctcccaagtagctgggactacaggcacatgccagcacacccagctaatttttgtattttgaatagagatgggtgtccgccatgttggccaggctggtcttgaactcctgacctcaggtgatccgcctgcctcagtcaaagtgctgggattacaggcatgagccaccatgcctggcccagttctaccatttcttctaaattcattagctgaaaactcttgtggttataattccttgaaatgactatttggatgccctatcctctatcttgaatagctccaggaatgcccggaataatttctagagttatttatctgctttgtatcactagtttttaagttttccgcacagtgttaggctacagttgttgcttattaatatttacaacaacaagaaaaataatcattatgttctgagcactctgggggcagggtctaactgaagcactcatcagatcctctgagctggaaattattattcatagacactatggctttccacataaggtgacagatttatcaaacaatctctgatcttccgtacgggtttcttccacgccattgtctccagtatggatatgtggaagattttcctctcctttaactttttaggtttgaaaatatttctaccattaaatgcctttcgctgtgtgaaataatatgaacccaggataaacattcaaataataggatgttgactattcccattaaagttgaaagaggaggcccatagctacagcatgagtcatccctactctggccgcttactgtgtcaagtcaggaatttaaacagatcctttgcccctcacaaaggctccgtttcctcctcagtagaatgggaaaaaataatactgggtcatgactttgtgccaaagaggtgtttcccactatagaccaactggagacagcttgggcagatgctggggtctgaaaccttttccaaataaatataggagaacaccatcagagggaacacgccctccctggtgagattccccattttaccttcttcgtggcttagtgtcttctaaaaggaaatgatctaagtgactagatgtgtgaaggaaattattaaacagaatactcaaaattggccttgatatgagagaagaaagtgtttagggtttgaaagactaatgagtttatgcgacatactagtccctttcgcaggaacagatacttttcagctggttcataggcaggtttgcattctctcttgattggacgagggggattatttcttgtatattaggctgcttatggcttctgcttcctagcccttgattctctttcacaattatcttccacaagccagcagtttctattcctttgcacatttaactcagctataagatgatctgtttcccctcaaaaccccaccaaagattgctgttgattttctcgaagatacagatactttcagtaaatgttgacccgtctctgttgttttgagctggagagtcaattttacacatagagtgactgtgcatcccagttttcccaggacaaacttacgcttgttgccatactgtagttattaacagtaccctctttcactttcaaaagtgtcctggtttgaatgacaaatcacgtggacaccctgtttatacacaatagttacccgttacttttcttctattgcataagagggaaatggaagatcacccttaaaatatcacagtaataattgccttagaaagatctactgatgaatggtaagttagagggcaaaagggagaaataggatatctacataatcaaagcatctccaaatctacaaagcatctcccctcaaatattttctaattataaagggggaaaagaatgagattacagtggaaaaacctggaagataccacttttgccaaatgatcaagattatcatcaccagtggtaagataaatcgacatcatgtactttttttttgagacagggtctcactctgttgcccaggctggagtgcagtggtgccatctcagctcactgcaacctccacctcccaggctcaagtgattctcgtgcctcagcctccctagtagctgggattacaggcacatgccaccacgcctggctaatttttgtatttttagtagagacagggtttcaccatgttggacaggctggtcttgaactcctggcctcaaatgatccaccctacttggcctcccaaagtgttgggattacaggcgtgagccaccgcgcctggcctgtatatccatattgtacctgcaataatatagcacactgtgtttcatgtattacataacctgtatattgcttaaagtatggtttctacattctggaagttagggaaaggtaaaaagaccaacgcctttttagttgtgcaaacttgagtaccagctctgtccattattagccatttgcctttgaggaaattatttaagctcttgggcctcagtttcctcatatactttcttatatgatgcactgaaaagggcacgtcacctctgtgggaatcttgccagaaatgtataacctgtttaatggtgagaaaacacatcagacaaacccaagttaagggatatcctacaaaatatctgactaggactcttacaaattgtcaaggtcctgaaggacaagaaaacacagaggaactgtctcagcttgcagagcacatgaggataaatgcagcaaaggatcctggattggatcttgaaacagaaaaagaagacattagtggagaatctggtgaaatccaagtataggtaacagtatcataccagagttaatttcttggttttgattattgtactatcagtatgtaagtcattaacagtaggagaagctggatgaagggtatgtaaaaactctctttcctactttttttttccccaagacagagtctcactctgttgccccagctggagttcagtgtcactgtcatggctcactgcagactcaaactcctgcactcaatggattctcctgccccagcctcccaagtgtctggcattacaggtacgcaccaccacacccaataatcttttttttttttttgagagggagtctcgctctgttgcccaggctggaatgcagtggcgtgatctcaactcgctgcaatctctgcctcctgggttcaagcaattctcctgcctcagcctcccaagtagctgggactacaggagcccaccaccacacttggatgatttttgtatttttagtagaaatggggtttcaccatgttggccaggcttgtctcgaactcctgacctcagatgatctgcctgcctcagcttcccaaagtgctgggattacaggcatgaatcaccacgtctggccccaataatcttttatatatatattattattattattattatactttaagttctagggtacatgtgcacaatgtgtgggtttgttacatatgtatacatgtgccatattggtatgctgcacccacccaataatctttctattttaattgttttgcagagatgggagtctctctatgttggccaggctggtctcgaactcctgggctcaagagatcctctggtcttggcctcccaaagtgccaggattacaagcatgagcccccgtgccagctcttttaaaaatcaggaaagcacaggaaaagagtgagtgggtacgcttggctggaagtcaagggcctggcacggggttgtggagccaggctcttcctggcggcggggctgtggggagctggatggctggactgaggttactgagagccctcctcagccgagcagcaggggatttacccatcaaagtaatcagggacagagtctgaacctgtccccattggctcaagataattaaaaggggatggaaaaaatgttatcttttaaagggctttgggaggttgaggccttcgcaggagaatggccaggagactagtgtgtgcaaagaggcaggcggatgatccccatcctacaggggcatttattttgtggacaccggggtcacctgggaagcaggtctggcctcagttctccggcctggggcactgtttgttctgtgtctcgcttgtggaataaagaggattcctgtttcagtgaggaaccacacctgctcagagggaaaatactctgcttgtcagaatctttcactttctgtgaaccagctccttggcctgatagggtcacagggcccaggagtggtcaaggaagcttctgtgaatgtattgaacgtcaagagtgtccagggggatgtgtggtgtttggcccgattcctgtcattgccagtggaaatgccatctctggagtttgccccaggtgtttgtgaagcaggttgggattcggagctgaacgctcctctaaagatatgtgctggcttcttatgtcatggctagacagcccctgctgggcctgtttgctgtccctttctctttgcccctgagttgtgtcaggagatttgaggaacttctgactcatcctagcaagtggctatggcctttttgcaaaaagctgtgtcccaagggaagaggcaaatgtgacccaggtaggtgccagcagtcacatggcttgcagggatgacaagctcaaacaggacttgatggctgggtgtgatggaaaccataacacatgattcttgggagcaggtccgtgctggctggcaggatatttggctctgtttgtgtttgaacagtctgacaacagccataaagcctagcagctgtgaggtatttcaggtaccggaggacttctggacttcggttaaccttggggtcttgggagtagaactttagctttgaataatttaagggcttggcctgtaacctcacgcctgtaaccccagcgctttgggaggccaaggtgggcggatcacttgaggtcaggaattagagaccagcctgggaaacatagcgaaaccccctctctacaaaaaaaaaaaaaaaaaaaaaaaaaaaaaaaaaaaagaaagaaagaaagaaaaaaaaaaagagccaggtgtgggggcacgtgcctgtagtcttagctacttgggagctgaggaaggaggattgtgtgagcccaggaggtccaggatacagtgagccatgattgtgccactgcactccggcctgggtggcaaagcaagaccctgtctcacaaaaataaaaaataaaaaaaaaaaaaaaataaaaaaaggaagcagtgagacagctcttacttagaaaaggaacccttaagccctctgcatattcagttctggagactctgctaagagcagcccttccattcattaatttcctgaagaaatggatttagatatattgctgtatttttttcttccagaagttgatccctagatgccagataaacatccccttgatcttctgggagcctaaggtttttacttggtcccatgggatgcaatagggctaaggccttcatggaaagttggaagtcaaactcgggagggagattagcccagcctcagcgacccctcctctttggacctgtgatagagattaatgaaatccggggattagtaccgaagatatcgtgtgctggcatgagcgcgggctctgggcctttctgggtcccaggctgggagctggctgaggcgctggagaggagcagtaaggaaggttggcatctgggtggacccgatgtcaggcctggcccgcgcacccaccagttatgtaaccttgggcaaatgtcctccctgagctgagcctttctttcctcatggactaaacagggtaagacgaccttgttttccagatggtgtggggccggaacagcacagggagtgtcggcacccgcttggcgctggcgttagcgtccgcagctctgcggctgggctttctgctcatctcctcgaaggagatcttagggtcttcattttgaaaaggggagatggagtggagctgctgggcccggctgcggaggtggtggtttcgtgcgtgggcgcgaggacggctttggcagccctttccgtgccctttccatggtgccaggccggttctggaggtgacagggctgaccggtctgtgtgggctcgagacacggccgcagccctttgaagctcttttaaacttcttcatcatttcagaatcatcactggaaaattcttttcgtcagatgtgtgccctgccaggtcatctggcagctcaagtgctctatttttttatttttatttttaatattttttgagacgaagtctcgctctgtcacccaggctggagtgcagtggcaccatctcggctcactgcaacctccgcctcccgggttcaagcgattctcctgcctcagcctcctgagtagctgggattacaggcatgtgccaccacgcctgctaatttttgtatttttagtagagatgggatttcaccattttggtcaagctggtcttgaactcctgacttcgtgatctgcccaccttggcctcccaaagtgctgggattacaggcatgaggcaccgtgcccggcctatttttaattttttttggccagtgaaacacgctgcaagtcccccttttgttcagtctccttgtgcaagccttggtgttagaagccatcatagccactggtttgggttgaaatcttagatgccaaactttactgcattacctcatttaatccctgcatctgtcctgcaaggaaggtgtttttattcctgttttcctgaagaggagtctgggattggaaaggttaagcatttacttaagcttgctgaacacagcccatctgtccaaccccgaaggccacgttctttaccaccatgctatgttgcgtcactcagataaatccagagaatgtgttcagcattttctttggctctgtgtccagagcaagcgactgatatccacactcagatatgaaaaaacctgttactcacctgacaggtgtcactttcaatttttaggaagtgccttttttgtttaacagcttcattgaagtataatttacatatcataaattcacccatttttagtgtaaacttaaataacattactcgtgaatatgtaagctttgatgttcatgcaaccatttatttatttatttatttttgagacggagtctcgttctgttgcccaggctgaagtgcagtggcgcgatctcggctcgctgcaaccttgacctcctgggttcaagcaattcttctgcctcagcctcttgagcagctgagactacaggcacacgccaccacacctggctaattttttgtatttttagtagagacggagtttcaccatgttggccaggttggtctcgaactcctggcctcaagtgatccacctgcctcggcctcccaaagtgttgggattacaggtgtgagccacctcgcccagccgtgtgcagcaatgtaaagtattttctttaaaaataagctgtttaatggatctgatttcactgggttgactgttataaatggtggtgggatgccaaggcacaggctgtgtgcagcaccacagtggtcacaaaccatgactaaaacacctccagatccctgctcagcacgtcctctcccatgtgtgggtcatatccttgtgttggtggttggtttccatttcctttgcaacatcccagggatgggaggcagcagttccacgctctgtatgggtttgaagacgcgggacgtaagttatggttatttggtttttatattattataaaaatttatttattattatttatatgccatctatttccacacatcaattgtgttaatagcaaaggtagaaagctgagagctaaataattaagagagagcaaagtaattaattaaaagcctttctctcttccttactgtttctcttttcttgttttcaaattgtcttttaatgctctactattatttatttatttttttatttttgagaaggagttttgctctgtcacccaggctgcagtgcggcgaagcaattcttctgcctcagcctcccgagtagctgggaccacaggccgtgccaccacgcctggctaatttttgtatttttattagagacagggtttcaccgtgttggccaggctggtcttgaactcctgacctcagatgttctgcatgccttggcctcccaaagtgctggaattacagctgtgagccaccgcgcccagccgctccactttttattagggaacatttcgaatgtgcacaaatgtagaatagtgtaataatgcctgtgtgctcattaccttttgtccccatcgcctccacaccagaatgtttggaaacaaatgctttgaattatctgcaaatatttgtaaatacttcagtatttgtctttaaaagataagaagtattttaaaaaaaaccacaatatgataatgccttaaaaatcaacaataattccttattgttcattagtcttcatatttccctgatagcctgacacagttttattgaggtataatttacaagctgtaaacttcacccattgtaaatataccgtttgattgttagtaatttttttttctttgagacataatcttgctctgtctccaggctggagtgcagtggtgcaatctcggctaactgtaacctctgcctcccgggttcaagccattctcctgcctcagcctccccagtagctgggactacaagtgtgcgccaccatgcccagctaatttttctatttttagtagagatgggatttcaccatgctggccaggatggtctccatctcttgaccttgtgatccacctgcctcggcctcccaaagtgttgggattacaggcgtgagccaccacgccggcctattgttagtaaatttaaacagttgtgcaaacatcgccacaatccaggtttagagcatttatgtattttaaatggtttgtttgcatcagaattttattagggctcgtgggctgtgattggttgtcttttcagtctcttttaatctattggtttgccctctcatttttccacgcttttttttcagtgtagaaatgtgtctttgtctttagaatttccaaaagtctagattttgtcaactgcatcattgtagtgctatttaacatgtccctctgccccttatttcctgtaaattgggtttggaggcccgatcagattgaggttaaatttttttttagcacatacatcatagagggtgttgtgtacttcagataggatgccatgttgtgtgattatttctctcttctggatgttagcagtctttgataattattgcacaaattcattatttcattagggttgtaaaattgtaaaatggtgatcttcttttctttttctttctttttttttttttttttttttgagatggagtctcgccctgttgcccaggctgcagtgcagtggtacgatctcagctcactgcaatctccacttcctggcttcaagtgattctcctgcctcagcctcccaagtagccaccacgcctgcctagtttttgttttttgtgtttagtagagacggggttttgccatgttggccaggctggttttgaattcctgacctcgtgatccaccggcctcggcctcccaaagtgctaagattacaggcgtgagccaccacgcccagcccaaaatggtgattttctaatttcacctttccttcttgctttattacctggatcatttctctaaagataaacttctccttttaaaccattcagttattctaacatttaatttgaatatgtaaggcaagatgaatgtttaattctaccatttttcaaaataatgagttgatttcccagcatcgttccaaggcaaccagtgggttttgttttgttttttagtgtcattataaagccggagacttaagcatactgaaagtgtttcagtcgattgcggttattattctttttgatgcttacttagttgttccatctttgaccagtgggaatctagtcaagttggtggcacctcagttcttttggacatgacgctagtagtttttggtagtttcttttctttgtggttagacaaacatttcatgacttatctggtacattttgtatcacagatctagaatcgatcacttcttcaagaagcattggttcttttcagtggaaaatcgtattagagaccacagtttgggtgctagggggctcataaatactgggtaggtcatttttcactaggacttttagtagacaaagttgaaaaaatgtttaagataaaatacatcagttgtttatactgttactttcgattccaattcaggaccataagtttttatttagcccagttgatcttacatttgtatcctagtcctccactttgagtgttctcattttcaaccacaccaatatgatcacttatttacttgatcagcacacacagaagtcttagaaaaactataccagtactactacaaacaatatgcttactgaaaacagtttaagctttttaaaggtttttgttgttgttgttgttgtttcccaggatcttctactagggagtgtacagaaagttttttgtgtttgttttttaaatttagacatggggggtctcactgttgcccaggctggacttaaactcctgggcttaagggatcttcctgcctcagcctgaagtagctgagactacaggcacgtgccaccatgcccagcaacaacgctgagttttagatcattaaagataaatgtttcagtgtttgctttggttcactttcaacttttaggaagtgccttttttgtttaacagctttattgtggcataatttatacatcataaattcccccattttaagtttaagttaaataactattaataaacttaatagagtggtacaaccatcaccagaattagattttgaacatttccattgcccccaaaagcacccagcaccatttgttgaaaaggccatctttttccaatggaattgccttggtgtttttgttgaaaattaattgaacatgagcataggatttcttgactcttaatttaccttcattcatgtttagtcctatttttacaccaacctgtcttggttactacagtttcataataagttttgaaaatgggagatgtaagtcttcaactttgttatttttcagtgttgttttgggtactccagatcctttgcatttccatataagttttaaaatcagcttgacaatttctgcaaaagtgtctgctgggatttctgctagggtttgcattgaatctgagatgactaggtagtgttgccatcttaacaatattgagtcttcctatccattagcatgtaatgcctctccatttatttagaccttctttgatttctctcagcaatatttcatagttttagtgtacacatcttgaactttcttgctaaatttattcctattttattcatttttcatgctagtgtgaatataacagtttttttagttttattttcagatggttcctagtatgtagaaatacaactgacttttgtatattgatcatattctgtgaccttggtgaacttgtttattaaatctagtaggggtgtgtgtgtgtgtgtgtgtgtgtgtgtgtattccttagaattctatacaggctgtattgactataaaaaacagttttacctcttcctccccagcgtacatgcctttaatttctttccttctgtacccttctcggctgcccttctctcctcctccctccttctctatctctttgcctcattacactggttagaacctctagtgcaaagttgagaagacagtacagagagcttccatataccccacaccctgttttccctgttattaacaccttacattcgcgtagcacatttgttataattagtgaactaatattggtatactattagtatcattagctgaagtccaaactttattcagattttgttagtttttacctaaagtacattttctgttccaggatcccattcagcatatcatatgacctatatttgtttttatttatttattttttttgagatggagtttcgctcttgttgcccaggctggagtgcaatggcttgatcttggctcaccgcaacctctgtctccccggttcaagcaattctcctgcctcagcctcccgagtagctgggattacaggcatatgccaccacacccggctaattttgtatttttagtagagacagggtttctccatgttggtccggctggtctcaaactcccgacctcaggtgatccgcccgcctcggcctcccaaagtgctgagattacagccatgagccactgtgcccggcctcatacgacctttagttgccatgttcccttagcctcctcttgaccgcgacagtttctcagactttctttgtttttaagacgttgacagctttgaagagtacgagtaaggttgtaaaatgttattcacttgggagttgtctgatgtttttctcatgtttagactgggattatgggattatgggtttggagaggaaaaccacagaagtgccattctcatcacatcatatcaagggtatgtactagcaacaggaattatcactgttgattttgaccttggtgacctaactgagatagtgtttgtcaggcttttccacagtaaagctactcttcctaccccccctgttttctatactgtgttctttagaaggaggtcactctgtacagtccacacataaggagtggagagtgatgctccatgtctttaagggtggaatatctacataagttattattaaattattctgcataggagatttctctcttctctccatttattcatttagtcatttatctatattagaatggactgatagatatttcttttatactttggattataatcagtactattttatttattttgttgctcaaattatttcagctttggctgttgggagctctttcacttggcttctatgtccctttgacataccccagtcatttttttaaaagcgcttccttactcaatggcactataaaatgtccaggttcatctcatctatttcctgctccagttctacaatcagccatttttctaagaaacactggttctatttattggagaatggtattagaaaccaatacctaggcaataggtgtgcttactgattctggtgtgttattacttttctcagctgacaaagcaaggaaatacatgtgtacactaaccagtgtatataagaacatctattaaataattctttatgtaaccacgtgttcattttaagctaaacatggattcatacacacctctccaactctagccattaccacacacacagatcattccagcatcctcctgttgcttgtctgtaatctcccactacaccagccatccatttgcttattcatttccagtatacatgcatagcactatcagaattgttaaccagcatgcatgtgggaagcaactttatcagccagaatacagtgcttatgtgtagtttctttgctgttagtcttacagattccactcatttccaaagttttttaggacaacaactttttcccacatctacttcagtgaggtcatttgatgcatttttaatacagttagattcttttgtcacttactgcattccatccaagaattccccaggctcctaaatgatattttaaaaatttcataccttaaggcttattctttgtgctgttaagttcagtgggtcttgataaatgaggtcatgtatccacaattacagtgtcatacagagtagtttcaccactcttaaaaaaaatctcctgtgcaacacctattaatccctcctttcctacactaaacctctggaaaccactgatctttttttttctttttctttttttttttggagacggacggagttttgctcttgctgcccaggctggggggcaatggtgcaatcttggctcactgcaacctccacttcctgagttcaagcgattctcctgcctcagcggctcaagtagctgggattacaggggtgtgccaccatgcctggctaatttttctaatattagtagagatggggtttcaccatgttggccagctggtctcgaactcctgacctcaggtgatccatccacctctgcttcccaaagtgctgggattgcaggcatgagccaccacgctcagccaaccactaatctttttattgcatttatagatttgccttttccaaactagcttctttcacttgacaatatgcacttaagatttgtccatgtctttttgtagcttgatatctcatttcttttcagcgctgaataatattccattgcatggatatgcaaaagtttgtttatgcactcactattcaaagacatactggatgcttcccgtttatggtgattatgaataaagctgctataaacattcacatgcacatttttgtgtggatataagttgtctttattttttttgagacagcgtctcactgtcacccaggctggagtgcagtggtgtgatctcagctcactacaacctccacctcctgggttcaagtgattctcattcctcagcctcccgagtagctgagactacaggcatgtgccaccacgcctggctaatttttgtgtttttagtagagatggggtttcaccatgttagccaggctggccttgaactcctgggctcagacgatccacccacctctgcctcccaaattgctgggactacaggtgtgggccattgtgtgaatataagtttccaaatcagtttggtaactgtctagaagtgcagttgctggattgttgggtgagactatgtttggatttttaagaacttgcccaactatctttgaaagtgtctgttccattttgcattcctagcagcaatgaatgagagtgcctattgctcacatgctcatcaacaattagttcagttttttttctaattttagctattctaataagtatgtagtagtatctcgttttaatttccaatgcccttatgacaaatgatgtttataatgttttcacttgcttatttttcatgtatatatttactttagtggggagtctgttcagattttttgccattttaaaaattgggctgtttattttcttattgttcagtttttagagttctttgtatgtttgcatgtaagactgttatcagatatgtgttttacaaatattttttcctagtctgtggcatggctttcacttgtcttaacagtgtcttttgaagaacagaagttttttgtttttgtttttgtttttcagacagagtctcagtctgttggccaggctagactgcagtggtgtgatctcggttcactgcaacctccacatcccaggttcaagcgattctcctgcctcagcctcccaagtagctgggattacaggcacacgccaccatgcccaactaatttttgtatttttagtagagacggggtttcaccacgttcgccaggatggtctcgaacacctgacctcgtgatctgcccgcctcggcctcccaaagtgctgggattacaggcttgagccactgtgccggcctagaacagaagtttttaactttaaaaatgtctaatttattattttttccccatggatcatgcttttagtgttgtatctaaaaactcattgccaaaatcaagatcacctagactatttctatgtttccttctagattttttttagtttcattttagatacaggtctctaattgattttgagttaattttcatgaaaggtattagatctaggtccatgtttttgcatatggatgttcatttttttccagcaccatttggcaaaaagactatcctttctctactgaactgcctttgctcctttgtcaaagatcagttggttatgtttgtgttaatctatttctgggctctctattctgttctattgatctatgtttctgctcttttgccaataccatgctgtcttcattactgtagctttaaagtaatgttgaaatcaggttgtgtgagttttcccaattagtcttccttctaggtttttgccttttttaaatgtattttattttactttgagacaaagtctcactctgtcacccaggctggagtgcagtggcatgatctcggctcactgcaacctctgcctcccgggcttaagcaatcctcctacttcagcccctcgtgtagctgggaccacaggtgcatgccatcacgcctggctaattttttgtatttttggtagagaaggggtttcaccatgttgcccatgctggtcttgagctcctgagctcaagtgattcacctgccttggcttcctaaagtggtgggattacaggcataagccacccactttgcccagccaggtctttgcctttccatataaactttggaatcattatgtcaacatctacaaagtagcttactgggaatttttgattgggattgcattaaatctatagatcatgtttggaagaattgacatcttaacaatattgagtcttccaatctgtgaacatggaatctctccatttatttttctctttgatttctttcatcacagttttatagttttctgcatatagactatgtacatattttgtcagagttatacataaattttcttttttttagtgctattgtaaattatattgtttttttcaacttcaaattatgattttttaattgctggtatagaaaaacaatggactgttctatagtaagtctgcaaacttgctatattagcttgttagtcctaagagatttttagtgattctttgggattttctgtatagacaattatgtcatctgtgaacaaagacagttttatttcctccttcatattctacataccttttctttcctttgcctgtcttattgcactagctaagtcttctagtacaatgctgattatgagtaatgagaaaggacacccttaccttgttcccaaggtacttagaggaaagtgtctagtttttcatcattaaatataatagctgcaggatttttgagggtttttttttatttatcaagttgaggtagtttctctctgttcccagtttgctgagagttttaaaaatcataagtgagtgttgggttttgtcaaatgacttttatccatcaattaataaaatcttatgatttttcttctttagtctgttaatatggtaaattacattgattgagttttgaatgttgaaccagccttgcatatctggaggaagaagtcccacttggccatggtttataatcctttttatacattgtcgaattcaatttactaatgttttattgaggatttttgcatctgtgttcatgagagatactggtctgtatctggtaatctgtattcctttctggtaatatatttttttcattaaatttttttattgacaataataattatacatatttatgggctacatattgaagttgcaatacatataatatataatgatcagatcagggtaattagcattccattatctcaaagatcatttccttgtattgggaaccttcaatatcctccttctagctattttaaactatatattattgttaactatagtcatcctacagtgttagagaatactagaacttattcctccttaaggtaatgttgactttttagaatgagttaggaagtgttctctctgcttcagtttttctggaagagattgtggagaattaatatcatttcttcctgacatgtttggtagaattcaccatctgggcctagtgctttcgttgtagaaggttattaattatttattcaatttatcttatagatataaatgtattcagattatctgtttctcctttgtgaaatatgatagtttgtgtctttaaggaattggtacatttcatctaagttatcaagtttgtgggcataaaatttttcataacattcctttattgtccttttaatttccatggcattaatagtgacaattcttaccatttttaaatggacttctaaattttatcattagtagttgtaaagaattaactttctatatattgtaaaatgtattgcttttgctgaaaaattaaatgattatatattttcttaaaatgtatctaatgggccaggcgcggtggctcacgtctgtaatcccagcacttttggaggccagggcgggcaggtcacaaggtcaggagatctagaccatcctggccaatggtgaaaccccgtgtctactaaaaatacaaaaattagctaggcgtggtggcatgtgcctgtagtcccagctactcaggaggctgaggcaagagaatcccttgaacccatgaggtggaggttgcagtgagctgagatcgcaccactgcactccagcctagtgacaaagcgagactccttctcaaaaaaaaaaaaaaaaagtatctaatggaatctaaatgtcatattaatttaatatctaccatcatctatttatctatttatttaaaaagctcataaaaaaggtcgtctttattggaaatattacatcagttttcttttattttactttaaattgataaataaaattatatctggttatcgtgtacaacatgatttgaaacgtatacattgtggaatggctcagttgagctaattaaaatatgcattatctcacatacttaccatttttagtggtgagaacacctaacatcatcccattttctctccgaacttgtatttccattttactcctcccccagatttttatcttaatatatcttatttttatgcttagaaaccttaataatttcttgtaacataaaaagcacaatttcatgggaaatgcatcttgttatgaaatagtctaggtctcccttttaaatcataattagttcatatacccatggctgagtatgacttactgcttgaatgatacaaggctcaacaccaattatattactatcttggtttttgtagatggaagtcctaaagaaatcttgtctgcatccctaagaagataagcatggaaagtttctgttagagcagtgttactcaagtctctgaattccttctgagttaaacgccagaaatcacttggtgatctttcatcaaaattatttttaggtatctatcatgaataactctattagagactcctttcattttgttgaaagtaatgagttagaaactacttgaattgcaaaaagatattttattagtcatcagagtcattgcactttctcaaaaacaacctcaacattcaaataaacctttgccagtcaccctggaggttttgcatagacaatgcatcattataagatttgaaatgagggtcaagtaaatatttcttttgtaaggtgggaaaaggatctcttatgaaagcaggggtgagaaatggcttgaccgtagtgatactcaaatttaggaatgaatgcaggcagagcttgaggctcatgaaaattatttcccttaaactacctaagtgcccaggtactccttggaaagattttgtgaaccgaggagcaagcaccttattttgaagacccatctatggaaaaggcaggaaggcatccttgataagatggcatttgataatagacctgaaggaaatgcaggtgaaaccatgtggctactgggggaagagaaatccaggcagaagaaacctcaagggcaaaaacactgaggcaggagtggtcttggaatgttctggaaacagcgagaagaccagtgttggttgtagcagactgaataagggaaagagtggtagaatatgaggtcagagagataagcagcagcatgttaggttttggagtccaaggtagaaatttgggattatattatgagtgagatgagaagaacgactttccactggagggttttgagtttgggggtgacatgacctggctttaattttaaaaggctcactctggctgctgtgttacttagtacatggaaatattgttgcctttatcatttctgggtagttttgctgacattctttttctgggttcacaactgtgatggcagttttagctgtgcaggattatgaaaatgatctgacccctgaggaatttgggatatcagtttggcctgggtgtggttctcttctgctttgtgggctcagaactcttgtattccaaaggaagccatcttctttctggccgtcagcccattgcacttgagccataaatgttggggtttgggcaccagataaatgtagtagggtctcggctgatgacctgcagaagcagatcatggaattatagaagctattgtaggtcagttcccaggaaacagactgaaactcagatttgtgtgtgagaagtttattggggagtgctcttttgaacattacctgtaaggagtaaggaaagcagtagtgcgcagaggggagtactggactctgatacagttgcagcagaggccctgaccatcctaaagagggatggccttttagaattgtctcaaatgaagcatgaggcctgggccttaacaccttccacatcaactagtcaatggttgtgggtgggccctggaaaagggatgtgcttgggccaagagtcattcttggggagaaacttaactgtgagccatcagctgccaagactccaggcaacctgggaaatgagtgtctcagtcttgaaggggtgtctgggtggcacaccatggtaattcactactgatgattaactggaagatccctttaaagatcatcaccaacacctcgacaccagacaccaccatttcgaagctaaagaaactgaggcctgggagtgtacaaatattgtttatccttgcatcatcttctcatgtgttaattacaaaacacaaaaatgacgtcaacacgtatgccttattttctaaaggagggagagtataaaactgattgttaattttttaaagtatttgcaaatatcaactgattgccattattgttggtgctgcatatactgtttttattttttaagaaacagttcttttacttcagaacaactgcatggactgttaaggtgatcaccaagttcacttcacatccgttccatgcacattctgtttccctcgttggtgcacacagtcttcattataaggaaaatccactctgtgcctaccgcaagaataggaatcaattcttaatgctgaaataatttcaactaacatgaagtacactgcttggatactgtagtttgatttgcttgggtggttctgtcttcctacattcattgtgaaagaaatctcttagaccacccagcaatcatgttcccgtatttacaaaatattttttacataaaagaaattgcacaggactaaaacaaccaaattttgtaatatgtggaccagattcaaaccaactataagaagacattttggagacaactggggaaaaatcaaacacattaaggaattattacttttcttaagagtgatagtggacttgcggtcatgttaaatttaagtcattatgtattagggtcaatactgaaatgtttataggtgaaatgatttgaggtctgggattacctaaaatattccagaaaataggaggaatagatgaaacaagaatggtaaaatgctgatggtagttgaaggtgggttatggcacaggggggataacttttaccattctcttaactttggtgtgtatttgaaaatttccataataaaaagttaaaaaaacccacattttttcatgtctggttttaaaacttttattttactggatggaagctaagaaaatgggttgtctagcctaattttgaacttctggcagtataactgtcccagattagggaagaggcacagcccagcctgcaaaaatgcccggctggacctcatgtgatcacacccattcgccacggcaggcagtgtcacctcctctgggtctcatggtgaataaccgcagcacggctgagaagggtgagctgacagaacaggtaggccttggttcaaacctggagcccacctttctttagcctctgtgatcttacacttcatgtgagctctctcaatctcatttataaactgggacttgtttgagggttagaagtgatgcagagaaggtatctagtgcatagttgatatccaacacaatggtagtcattattgataaaaagctgtttgttctcctctcctgggaaatagtcctgctttgtctccaggttgtagaagttttccctgggagtttatcttggtccgggaggaacaagtccctatctctagatttcattcatggggtcccatgtcaccctgaaccttctaccttttaatgcttgtctgcaagtttatttatagtccatcttttggacttgggctaagaatttgtaatatatgtaaaacacgaggatttgagaggaagcctaaaatgtctctaagaaatcttttcattgttgggcagctctggtattttttattcctttgtgatttggtgccctgaagcaaacatggctaatcaaataagagtcacctacagatcctgattccttggccaggcctccatcccctaaaatggggaaattgctccctggtgctaagtggaggcaaattaataataataaattgcattaatacttttcaatagcattttaattaaacttttttagtaacagtatgaaaatctgccttattcttttatatactattttattaatctactccatgagcactttttcagttttcaaatgtatgtatttatcatttcatttgatttattctaacaacatgcctgtgaactagagaggtggaaacagagaaggccaaggtgaaggacttcattccaaacataggatctcacttccacccagagtgctgtcccttaattagacccaggtttttctgtgggcagattacaatctacccattgatcttaaagtcacgccaggttaatttcccagttgacaactgccacctgctccctccctatgggaatttcccaaggggaacgtggccagccctgactcagccagcccacacctcgcctagacttccagcagccacccttcacccaccttgatcacacttgaaggaaatcaaaagtaacaccttcttgggaaagggctggggcctctctccggagatggtgctgcctcccactcagcagctgctgtcttgtccatttagactcacagatggggttgagtctcagaagcctctatgtggatcagaactggggtgggggaatctgagggaagaggctcatttcctggtgctctgtgggagtgacagactttgagtcttgcaacaatccttcacttctttgtttgaggatagcaacaaagaaagaagacagcacttgttcttcttccatggagtccacaataggtttccgaaggcagacattttagcagataccctttcgttgtctagcaatgcttccttgtcattaccagtttgagctggatattcataagagctaccatttactgagcagaagccatgcgccgggcaccatgctgaacgagacagtctgagccccagggaatacagttgtgaataaagctttcctgaagcttacaatttactgggttatggctactgaacaactgcttaagttgaatgattagaaggggatgcagggtttagaaggggaagtccagggtgcttcaggagtctatagctgacattatttgatttaatcctgacagtagctctgggaagtagtatcactatttctcatttttcagacaagacaaccgaggctgagaagtttaagtacatttctcattgaaaggaaagtgctgggatttgacttggtgagcttctactctgtactcaatgctcatacacagaaacaaaactactcaccaatgttggaactgtacctcttctgtaagtttaaatttggacagatcattgttcgattagaagatcaaaggttcttacctctatggagaggcttcagggggttgtgaaacccctgaaactgtatgcaaatttcagtgagtatctgcatgtgtctcctggggagaaagtccctaggtcacaccatgttctttgaggatcaatgacaccaaaatgttaataaccactgcattggctcatgtattcatgactgcagctgactttgttctcagcccactcagcaggcagctgaacaagcccagtgcaaaaagaggttagtgggtgtttgttggtccccacatttttacaagttgtcgatggtgatggctgagggtctgttcacctctcagccttgctccttcccctcacctgccaagccgtctggttgggataggtaggacaggtggtgtgggtctcttgtggggcaccaagagccttctcccaatatacctctctgaagggtccagttgtgccatagaagccagtatttcagatttttagacattatattagtttcctgggctgctgtaacaaagtacaacaaactgggtggcttaaaacaacagaaatgcattctctcacagttctggaggccagaagtctgaaatcaaagtgtctaaaggctctagggaagaatcctttcttgcctgtccctagcttctggtgttgcaggcaatccttagtattcctcagctgcgtcactccaatttccatctcttcgtgcagctgtcttttctctgtctctgtgtctttcatgatctttttataaagataccagtcattggacttagggtccccccagtccagtatgatcccatcttaactaacatctgcaaaggccctctttccaaataaggtcaccttctgaggttggggggaagcaaattttgggactacgctattcaatccaatactgatatagtcttccaccttgtcttctgttaacaaaataagtgcttctcagtaaaagaacagtaacctcagaagccttgtcagtggtttatgtaggagtgtaaatgaatttatcaggtatttttccaaaggcaggttctgcttgggcaagtagatatgcagttcctaggtagctggatgggaagaggtaaactcctagcaggggagggcaactggctaggaggctggagacactaaagacaaattttcttcactttatagtgttcctaggttggctcttgatgtagaattcattcattattttgacgtaaaattcattcatttagtgacccattcattcattctaaaaatatagaatgtttgatgtgttaagacatttttttttttgatggagttttgctcttaccgccctggctggagtacaatggcgtgatctcggctcactgcaacctccgcctcccaggttcaagggattctcctgcctcaacctcccaagtagctgggattacaggcatgtgccaccatgcccggctaatttcgtatttttagtagagacggggtttctccatgttggtcaggctggtctcgaactcccaacctcaggtgatccaccccccttggcctcccaaaatgctgggattacgggcatgagccaccatgccctgcctgatgtgttaagaaattttaagggcaaacaaaatgaatcagttacggcccctgccctaaatgaacctgcaatctcaccggggaaaggaacgggcatggactacctgtatgcaggtcagaaagtgaggagtgttccctgtccataacacttagagccctgctggcgagaagcagtgagaatgctgtgcatatatctaccctagggtagatcagaaaaggtctcatgaaagtggagatactggaactgggttttcaaggatggatatgatggaaacatggagaagtaggagagagacaagtggaatcacagaacaaagacacttgtgtgggagatcaggagacatgaatgggaaatggcatagcttggctggagtgtcatgaacaggaagcatctggattgtgggggctttgactgccaggctaaggaagtcaggctctagattattattattattattatttttttttttgagaaagagtctcactgttccccaggctggagtatagtggcatgatacaggttcactgtctcttgggttcaagcaattctcctgcctcagactcctgagtagctgggactacaggcacgcaccaccatgcccagctaattttttgtatttttaatagagatggggtttctgccatgttggccaggctggtctcaaactcctggcctcaagttatctgcccgcttcggcctcccaaagtgctgggattacagggatgagccactgtgcccagcctgggctctagattttaatgctggggccatgaggggctctgaaagagactgagctgtgaaaggcaggattagaatggtgtttaagaaagctaactgggtggggttgtggtggcttatgcctataatcacagcactttgggagatggaggtgagaggatcccttgagcctaggagttcgagtctagcctgggcaacaaaatgagaactctgtctctataaaattttttaaaaatttagctgggtatggtggtgcacacctgtggtcccagctacatgggaggctgaggtgggaggatccttgagcccaggaggttgaggctgcaatgagcaataatggcaccactgcacttcagcctgattgacagagcaagaccctgtctcaaaaagaaaaaaaaaaaaaaaaaaagaaggctaagaaggctaactggacagcagaacatgtcatgggaagaagaaatgggtacaggaaaccagttaggccacagcaagaggggaccagcactggaagttggatagagccacgtgattggggcaagaatggagaagtcagcacgaaacaaaatatatagtgagggcagggcagggcaactcattggatggggccaagtggttcttgtttttttttttttttaagttagaaatgtttattaacctaacatttatttttagtcatttttttgctatgcaatattttatacacacaaaggaacataggtaatgtatatgtaagttaggaagtgtaatagtcaaatgagcaccctcgaacttagcattcactacctgtgggcctgacctcatctgctgccctacactgaatttcttattgatcattctcttgcttttttctcataattttaccatatatgtttgtatccctaaaacatagggagggagatatcacctcctgtggatgacacctgggaggtatttcagaggcactagattaaccttcttctctctgttccagccctgtccgaagagcagctgctgcctgacagtgacttgggggcaggccccatagtaacacattctgtggcaggaggttctgtcagacgatggtgacttacagattagagactttttaaggagtgatggaggagctgaagatttatacttcagagaagagcttactttctcccggcctaggggaggacactcttccagtcatatggctctgtaatattcactccaaaacgtggtggcttaaaaacatttattttgctcacaaatcttcagtctgggcaaggatagcttgttgctattccacttagtattgaatagggtggcttgaaggctgaagttggagtcctctgaaggctcactcactcatatgtctggtgactgggctgggaagacacaaagagttgggggctggaacagctggggctccttggcactctctatgtgctgtctccatattgtctctccctcatagtagctttgagggccaaatgtcttacatggtggctaatgaatacaagttcatatgtcccaagagaaggagatccaaatggaagctgtattacctttgatatcctaacctcagagatcacatagccatactttattggtagaggagtcacgtccaaagggagggaacatagaccccatttcttgatgccaaacttacacacacaaaattttagtaggttcttaggaggaatctgcggtaatactatgtgtagacaatgtttttcacatggtaagaatggatccacaaaaatgtggctatctttggaaaatacagtctgacccagtctctgacttagaagaatgaaatgctttgatctgttttcacaggattagccttggaaagaataggaatacacatatgaacaggtaacagcttggaaaataaccagtcaaacataagggctagggtctaaggtacatccctcagaggacttctgcttcaaaacccaaggaaatggcatcaacccacagaaattggtctcgagctctgtaactgatgatcactgtgctgtagcatttaactcaaacaagagtaattatttttgagctcccatttcatgtgaggtgccacggtaggtatcagcatacagagacagagagacacacattttctgagatgctcacaagctgcttactgaaacatcttgtgaccagacatgacagagcgaggtgattgcaggccagaaaagggaaagagaggcaaaggaagaaagaagacatgaaacccaagaaagaaaggagtaatagaaagtgagaaagaagatttaaaaaaattttccatttctatttgagtctcttatcttttctgctctaatattgtgctcttttcctgcaacctcacacacacaaaattttaactagtaggttcttaggaggaatctgcagtaatactatgagtagacaatgttttacacaaagccttgggactcctttttgaggtaagcttcaaataccccagcagagatcttcacagtttgcacactgttgaccagtggctcactgctagtttcctcaccttcaactcccttgggatgccatcctccaaagcacagtctacctcgtggcgctctcctgcggattcttacaggtagatgggattcatgggatggagcttgagcaaggaagatgaatgactacttgtggtgtgaccagttctattttactgggggaaagagggctgggtgctcagtttatctgcatctccatacttcattcacccgtgaaactgaacaacctttcacccatgaaactgaagaagggaaagggtgcagggaacttgcacacattcagcaactggtctggaatctctcccaggttctctccacctcgggggccttccggacagtcccattgtcagcccctactgcttatgctgggatatggcctgggcccatctgaaggtctacagaattgatcctccaagctgaagaggcttccgataatttccattgttaattttttatttataacagctttttaatttttttgtcttttaaaaaatattaattttattttattttaagttcctggatacatgtgcaggccgtgcaagattgttacataggtaaatgtgtgccatggtggtttgctgcacctaccaacccatcacctaggtattcagcccagcatccattagctatccttcctgatgttctccttccccctgcccccggacaggccccagtgtgtaatgttcccctccctgtgtccatgtattctcattgttcaactcccacttataagtgagaacatgtgtggtgtttggttttctgtccctgtgttactttgctgaggttaatggcttccagcttcatccatgtccctgcaaaggacatgatctcgttcctttttatggctgtacagtattccacggtgtatttgtaccatattttctttatccagtctatcactgatgggcatttgggttgaatctatgtctttgctattgtgaatagtgttgcaatgaacatacatgtgcatgtatatttataatagaatgatttatattcctttatggaccagtggaacagaatagagatctcagaaataagactgcacatctacaaccatctgatcttcaacaaacctgacaataacaagcaatggggaaaggattccctatttaataaatggtgctgggaaaactggctagccatacacaggaaatggaaactggaccccttccttacaccttatgcaaaaattaactttatatggattaaagacttaaatgtaaaaccccaaactataaaaaccctagaagaaaatctaggcagtaccattcaggatataggcatgggcaaagatttcatgatgaaaacttcaaaagcaattgcaacaaaagccaaaattgacaaatggtatctaattaaagagcttctgcatagcaaaaaaaaaaaaaaaaagtatcatcagagtaaacagacaacctacagaatgggagaaaatttttgcaatctatccatctgacaaagggctaatattcagaatctacaagaagcttaaacaaatttataagaaaaaaaaaacaaccccattaaacagtgagcaaaggacatgaacagacacttctcaaaataagacatttatgcggccaacaaacatgaaaaaaatctcaacatcaccgatcgttagagaaatgcaaatcaaaccacaatgagatatcatctcacaccagtcggaatggcaattattaaaaagccaagaaacaacagatgctggcgaggctgtggagaaataggaacgcttttacactgttggtgggagtgtaaattagctcaaccattgtggaaaacagttggtgattcctcagaaacctagaaccagaaatatcatttgacccagcaatcccattactgggtataacagcttttaaaagataattcgcgtgccatacaattcactcatttaaagtgtacaattcagtggttgttagtatattcacaattgtgtagtcattgccacgatcagttttagagcattttcgtcactccagaaggaaaccctgtacctatcagcagtcattccccatttcccataatcagtatcccccatacccccacctctaggaaacaactgatttacttcctcctgctgatggacttgcctatcctgatggattgtatgatttcgtggaatcatacaatttgtgtggtcttttgtgactggcttctttcaagattttcaagtttcagtcatactgcagcatttattagcatttcattcctttttattgttgaatactattccattttctggatatagtacatttattcatcagttggtggaaattttagttgtttacactttttgataattatgaataatgctgctaagaggatttgtgtacaatatttgtatggacatgtttttagttctcttgggtatgtaactagggcttgaattgctggatcatatggtaactctatgtttaactttttgaggaactgtcaagactgttttccaaacaaatggctgcatcatttttttattcccattagcaatgtaaatgagtgttccaatttctccacattctcaccaacacttgttatttctgtcttttttattatattcatcctggtggtatgaagtgatatcactgtggctttgatttgcctttccctaagagctaatgatgttgagaatctagtcatgtgcttattaaccattaatatatctcctttggagaaatatctagtcagatcctttgcccgtttattaattgggtaatttgtgtttttattaaggagttgtaaaagttatttatatgtgctggatacaagtcccttatcagatatatgatttgctaatattttctcccattctgtaggttttttttttttaaccttcttgatgctgtcctctgaagggcaaaagttgtaattttgatcatgtccaatttatgtatttttttgtggttgttatttgtgcttttggcataatagctaagacactattgcttaatccaaggccacaaagacttatgcctatgtttcttctaagagtttaatagtttagctttcacatttaggtctttgactcattttgaggtaatttttgtataagtgtgaggaaagggtccaacttcattcttttgcatgtggttatccaattttcccagcattatttgttgaaaagactattttttccctcattgaaatgtcgtgatagccgatgttttccttttccaatgtaaatatgttgtagtaaaatatatataacataaaatttaccatcttaaccatttattgtttgggtttttttgtttgttggtttgtttgtttttgagacaaggtctcactctgttgcctaggctggagtgcggtggcatgatcatggctcactgcagccttgacctactgggctcaggtgattctcccacctcagcctcccaagtagctgggactacaggtgtacaccaccaagcccaggtaatttttaaattttttgtagagaaagggtttcactttgttgcccaggctgctctcgaactcctgggctctagcgatcctcccaccaagattacaggcatgaggcaccgtgactggctcattgttagtttttatggcatggaaaagcagtgagaaactattaatagggaaattgcagagaaatttcttgatgaatcctggacagtagagatttgtgacagctatgttctgctgtgcatttcacaagcattatctcatttaatcctcacaactctatgaggtattatatgattattcccatcttattgatgaaaaaccgagacttagagggaggttaagaagcttgcacagaggtcaactgctaataaccagtggtgctgggctttgaatccaggcccatctgactctagcactggtattaacaattatgggctcatgctgaaataacgacagctgctaactatgtgtcagccactcttctaagcatattactaactcatttcattcctacagtaatcatactcacatacagatggataaatggagatgcagagtttcaatagcaccccaaccaatcagtggtaaagacagaatttgaacccagagtctttgattttaatgtttttagccaccacactatattcttcaaagctttgttgctgtggtttttaggtttcatctgcagcttcttttgtcagattttttttttttttaagtctactcacttgtgatttctacaaacaagttgctttaattttgcctggtctctttgattccaaggttgctcgctgtaatagccttaaagaaatttctaggagatatttttgtcttaatgagatgagctgttctcataatgctgagcttctgcttttctaagccaggagagttacttgtaataactggggcatcaacagcttatgggaacccaaccaatcccactgtggattttatttaaggcaagatgggcgactttcaccctttaggcctgtggatcactgttcatggctcttaaatgaatgctgccgttcaaaaagatgactggcacgatgctcccagtttttactatttcttttgaaacatgaaatgtcagagcttattaattctacttgttctttctgcagatgaaaaaaactctgaccgccccaaaggttatgagacttgcccaggacttctgatcctagtccagggaatttcctggcctctaggctgcctcttggcgatgtcggtatatttgtttttttgtgttttggggggtgaacagtcccagggtatctgctgctcatgtcttcatagtggaatgcaggatgatataatgcttttcagctgtttcattgtgaatttactccagatagtttttgtttaatcacaacaatatttcctgggttgccaggcaacatggtgatgaagtttcagtctttattgccagccaatgaaatggaaagggttctatcttttgtttccagatgaagttctctctctctctttctagatttgtgttcgctttgtgttgagatgaaaaaatcaaaaaggcataaggagaaaaagctaattaaagagggaatgggctgggcgcagtggctcacgcctggaatctcagcactttgggaggccgaggcaggtggatcacaagttcaagagattgagaccatcctggccaacacgatgaaaccctgtctctactaaaaataccaaaaattagctgggcgtggtggtgcatgcttgtaatcccagctactcgggaggctgaggcaggagaatcgcttgaacccgggaggtggaagttgcagtgagccgagattgcacaattgcactccagcctggtgacagaatgagactctgtctcaaaaaaaaaaaaaaaaaaaaaagggaatgaacatccttccttctggttcttttacttgaataagtggaaggtgtggacatttgtgtgtgacagtaggttgggggaatgttggcaccttggagagttaccttaaaactcaacatagacctggctaattgggaaaggaaacacgtttaattaagacaaaattagaaagtcacaactccagggtaattcacatagataaaatatgcatccatctgaggaagaactactgggtgcatgtaagctacaaattcataatgaaatgtgtgtgcgtgctcctccctcgctgctttcaggtctggttctaacccaacgaacacttttgttaagttgaggaatcctcaatggaaatgggaggatggcaatcccggaagacactaaagaaaattaatgaatgatttgtggttagaggaaagacgaaaagaacccgtgttgtgttgatgagttggcggaggcagaatcctgcttgccacccaccaggaccttctggtgcattctcattccactgttgccatctgtgggtgctgcatgttgcttcccctcccgttacctggtgcctctgatgcctcccttctgatgtctctctgatggtgtcgctcatttttaccaggaagctcatttgcttgtgctggtgttgtggcccgtgaggtaagcatttccctacaggagaccaaggtccaggaccctgcatcatacaagcccactaagtcaccagcttcaggaaggtcttttgtcatcatctagacacatccctgttctgcctcttgcaccccgcctccagctctcttcttcttttctttgggtcccagcctctctttttggataccttcttttataaaataaaacccagatatttggccctgttcagaactgcagttcctgtccccctcactccctatatcctgtagcatgcatccacaatgagtttccttcataaacaacatgcttccggaatttctctgatctgatttcctctgcatcacctttgccagaatcacacttgccaaggtttccagtgactcctaatcatcaacaatcctaaccgtcaacaaaacagaccattctccatgttttgtcattcattcattcattcattcatttgataaagctgattgcacatgtaccatgctggacacatgagatgaaggatgcaggtcctgctgtcaacacacgtgcattccagtagaggagaaaccaacacacagacaccaatgtctggctcctgacctgatctgagggcaggaaatgcttcctaggactctcggtggcttggttggttggctcatcagttgactgcttaataccttcctttacctgatctacatgttttgccctttaatccaagctattcttacatcctcctttggagatagatatgttctgtaatcctgtctttataaagccccttagtatacaccacatatttaaaaatacctactgtgcacagatcaaggcttcaataacataaaaatgcaagaggttgagaccacagcaaatgagcatttaaaggaaggcaagaaggaactgtttaatgaaagaaaaaaaatggcaaaacaacttgaaacgacttagagtgagaacctaacctttattcataaacacctacagatgcttatgactgtcagtagtcaacattcagggatgcttggattttgccctttcatccaagctattcttacaccctcctttgtagagagatatattctgtgatcccagaaagccccttaatacataccacatatttaaaaatgcctaaatgtacagatcaaggctgcaataacatataatgaaagaaaaggatggcaaaacagaacttaaaacaagttagagtgagaacctagtgtttagtcataaacacgtacagatgtttatgaacgttagcagtcaacattcagggatgcttgttcagccagtaggtgccgggtaatggagctgattgctcatcagctacatctgttctgattgacagagtggatttccaataaagataatcaaagcctcggctcaggctccttcaccttcacagccatgtgagggtccagtaaactgttcacatgcttataggtttttgtaaaatttatacaagtaagataaatgatctataattggttaagaccacagtctctttctagtgcgatttcctctccaatatactcccttcttgaattggtgactgcaggcatttttgggatcagaataagggaagcggagtcaagcagacatttagtttggattagaggtatatatttatgaggttcacagttgcttctgtgtatagttaactatttgtagccactcgtgtgagtagtttacagaaatgcttctaatgccgattgtgctgactcaaccagttccatgactgagctgaggtgaacaggcatttaaggacctggcaccagaagtgtgtgggtaatagaagatgatcaaggtttgacatggaaggggccagaagctattctgtgacaaattcttcccatcatcagatatgtaaaattttaagctgaagattcaactgtcatcaatgccttgtcaaaatataagctgtctcttgtccagtatatacttgataatgcagcctacgaaactgtaaatgcaccgcagaaagaattattttcatatctttccataggaaatccatagaaatattcagatattaacaagtaatctgtaacaaaaaattcaatcataaaagcagtaacagataaagaagataaaatctttgaaaagaagtaatggatacactcttgaattcttggcaatcaaattaatgaagaggtatgaatctagtcaccccagaaccccagcgaaatgggccccagtcctgagtctgtgctctaggggacccagttatagctttcctccttgttccattccaagggtgcggagtccctggggagtgaggagacacttgcctgtcagtggtgttagcctttggcagttttgacaagaagtctacacctgtttctccacactggagcctcgtatctggaaagcacattcgggaaagaaatttgtaaatcacactggagagagagtagcaaaccagaacatatagccagtgtattggagaaggccagatggtagaaaaccaagtgcaattttgtgacatgtaaaaagtagccacccacttaggctaccccacaggaacaagggagagccaagtgcctcagaataataggttgaagaggaagttggctggagagagaggcccttggaaagaagaatgctgttgagatgggtggatcttggctggcaaggccctgagggtgacaggccatggctctgccttccagagccagcaggaatgtgtggtgacccttgtatcctgcccgcctgcctggctgaggctgcagccagactacgaactaaaatgaaaatatccttctaagggtatttcaggttcaaaatccagttggctagtgggaggaaaaggatattatctgatgacagatagtggtagccagtgtctgatggttactcatagaatcaacataggctgggaattccagggaggtgcattccagaaagcctgcatcctagtacttgactctggtttagggaaacaatggggtgtcatggagggagtgtgtgtgtgtgtgtgtgtgtatctgtgtgttcctgtgtgtgctgaacattcatctctagtcatgatgtgactggagttagaaggtcattcctccattcttcaaaagcttggggattcctgagaacactaagctcaggaggatgatgtttgcttttcctcaactcatgttgcaaatatctatggtgagcttgctctataccagccatttgtgctaagaactggaatgtaaagatagaggagataggctccctccctttaggattctgaaaatttaacagggggcttacagaattatgttctgataaagaatgatctagcagaaactagcagctactcgttaattctctggacgtcggcattggctgagttatgttggatgacttttggactgggagcaaagatggatgtttgcagtaagttaattttgggctataagaccttctgtctcataacagatctatttccatttcgctctacttttcagcacatcagtttcggctactcacagcctcgtaggtccctggatgagtataagtacaaagagcattcagtaaggtcactactctctgttgctcctcttgtaactgtcttctaagtataaagctgaccagtggctccttccaaattggtccattgctgtatgggtggtaaggatggctcatctacagtaatggcccttaatctggggactgaagcactagctgttgggagccagagtccattgtgtgcattggttgaccctgagagctaacctgctggttctgctgtagaaacctatgctcttcactcaaggaagccatttgggccaaaacagtagaatgttttcagggctgtaatgtgagtaagttatgaaacaaatggcagtgaagtcagtgctttgtcttcttccaaagaagaagaaacatgaaagctattctatgctttaaagtttaatggtttgcagcaatagcacagaacattcctacattacgaggtatgagccattctgtatgataataaacaagagtagctgacatgactccatgtttggtgaaaaagggaggatatcccagaacaaagaaccagagaagtggataaaattccatagaaagttgccattgagggtgatggtgacgtgggatgtcatagaggggagggtgtgtgtgtgtgtgtgtgtgtgtgtgtgtgtgtgtagttgagcattcatctctagtcctgatatttagctatagtgttgcccctaggaacttggaaattaaaggagcagaagtaagactatgatggttgtaagcttctcatccaatgggactgtggccagcccctaagaaacaactaacttaagcataggagcaaccagcgaacaaatgtccaggcaaatggatgcttccttgtgcctccttgctttctaaactagttagtttgcattatttgtatagttaaaagataatgcttatgttatgcaatttgcttgtagtttagaaaagtgattatactgatagtttttcctggatatctttaaatccattgttatacttgacaaatacctctcaaatctctcaaacattcttcctaaaaagaactgtgaacatctctcagtgccttgggcaggtctttgaatgtagcaggcgattggaagtttgcggttgttgatggctgatgatgatgatgatgataatgttttatatgctcactatgcacgaggttctttatcctgcacttggctttcatgaagtcatttcattgccaacactctgagtcaggtgttggcaataagaggataagtaactagtctgtgtccacatggtgcatgagtggctgaactgggaaagggaccctagtgtttcagactctaaagtctaagctcttaattgctccactgtactgattccatgatactcatgagcactgactacctgctactcctctccttaccagatataagtcaaaccatataaataaaccagatgttttttccctagacaaagatgctattattgctcgagaagatgaatatcagagatttttataaaagcaaaattgggaatccggttttctttcaatgggatatttgctgccaggtcctgggagaatatattttttcttttcattttatttttagttgacacataataattgtacatatttctgtggtacaggtgatatttcaacatatggtgtgcaatactcaaatcagaatagttagcgtttccatcacctcaaacatttatcatttctttgtgttgtgaacattcaaaatcctttcttctagcttttgaaaataacactaaattattgttaaccgtattcaccctacccagtgctacagaacactagaatttattcctcccatctggctgtaactttgtgtccattagccaacctctccctatcctcccttccccactaccattcccaccctaatctccacaactctactctctgcttctctaagctcaatctttttttttttaaatatggaatttatttttctgtgcctaacttattttacttaaaattatgtcctccaggcttattcacattgctgccaatgacaagatttcattctttttttttatgactgaatactattccattgtgtatatataccctgttttctttatccactcatctgttggtggacacttaggttgcttccaaatcttggctattgtgaatagtgctgcagtaaacatgggggtgtaggtatctcttcggtatatcaatttcctttctttaggataaatgccctggggagtatcttaaagatggtgttcactttgttattaacagatatgttccctgccatcttcttagctactgaaaaaaagtggatgcctggtccagtggactaagcaggtctggcatggagcttctagttctagcctgaccaccctcactcacaggctgtgggattaaatccaagatacttgatgatccattgtattagtctgttctcacgctgctagtaaagacatacccaagactgggtaatttgtaaaaagagatttaattgactcacagttctgcagggctggggaggcctcaggaaacttacaattatgatggaagggaaagcaaatacgtccttcttcacatggccgcagcaaggagaagtgccaagcaaagggggaaaagtctcttataaaaacatcagatcttgtgagaagtcactcactaccatgagaacagcatggaggtaatcgcctccatgattcaattacttcccactgggtccctcccacaacacatggggattatgggaactacaattcaagatgagatgtgggtgaggacacagccaaaccatatcatccatggtgcagaagactcatgcatttgagacaatttgcctcctacctagcagggatgtaatgggatttaatataggtgaaagtgatttttagtctctctattggaagatgtaagccaatagatgatgtggctctttatgtcctaaaacttgttaagaaaataattctccagattgggcaatcaaatgcttctttaaaatgatttttgagatacccctccctaaaaaataatatgacaaagtacaaacaaaaacatgtatgtttaggaaagagtatgtagttttaggctcccgttcagctggtgatttttgcctgttagtgtaaaaagtcagtgccgtccggggttgatacctgaaggagggatgggcagaaagcactgaagcttgggaatcagtcctgcctgatgaggatggaggacagcatttggagggcagcctgcagggaagggagaatccacacaaggatggctgaactcacagggacagggcagcgactgcaagggataggggaatggctgctactggcacattattagtaatcctaacccctctgccgcttgttatctcggtgactttagtcttttattttaatttaattttatttttttgagatggagtctcgctctgtcgcccaggctggagtacagtggcccaatctcggctcacttcaagctccgcctcctgggttcatgccattcccctgcctcagtctcccgagtagctgggactacaggcgtctgccaccacgcccagctaattttttgtatttttagtagagacggggtttcactgtgttagccaggatggtctcgatctcctgacctcgcgatgtgcccgcctcggcctcccaaagtgctgggattacaggcgcgagccactgcgcccggcctagccttttactttttaaagcaagtgtacatatgttgtcttttttcccccttttactggaaagctgtggggggtgcagagatgatctcattacagtcaaagcagtggaggttcaacgagtgccattgacttgctgagagagttactttactgtgtggattgggatttgaggctccttggctgtgagtttgctgcttgtctacatcttcagtgtcacaatagtgcccggatggctaacattgtttctaaaacattggctcttggagagttatagtgaaagaaacggttttcgaattgaatgatttaaaatgcatttgggcatagagtcctacaaatgtgcaatttgttcctgctagtgagcctagagattaagggatttgggtttttttttttttttttttttttttttagatagagtttcactctcgttgcccaggctggagtgcaatggcgtgatcttagctcactgcagcctctgccagattcaagcgattctcctgcctcagcctcctaagtagctgggattacaggcctgtgccaccacacctgactaattttgtatccttagtagagatggggtttcgctatgttggtcaggctggtctcgaactctgacctctgttgatctacccgcctcagcctcccaaagtgccaagattacaggtgtgagccaccaggcctggccctacttttttttttttaatctatttggagatttaaaaaaaagtcaccaggaagcctattatttttccatgtttctcccacaatgaaaatagatttctggttttttttttatttttttgaatgtgtgagacattctcattacataaaatttaaataatataaaaaaaaataaagaagacagtacaggcatcccaaggtaatcacattcagtttgaagattggcatttgcaggcatgtactctttgtgactgcttggagtttccttgttaaagaaaccaaggctagcagccttttataaagagcaacaatcacccttactttttttttttttttaacaatgcagacttttcctaacaccagttttacttaatgtgcagcacaactgtgctgaatactcaccttgtgaagtagagaaaatgggcacatatggggcaagccagaattctgaaggggaaggaggtagagagttgaggacatgcagaaaatagctggtgtggatgctgaagaggcagttcggtctgttcaggtcaacaagcttaacttgagttcctatactgtgccaggcatgagggacacagaaaaagaaaagatgctctcctgcctgcaggggcatggcagggcagtgatggcagacacttccgaataataaggggtgtggtaaaggcaagtctgagtgctgtggaaaccaggctgcgggcaggaagttgctgtagtccagcttctgttggcaagcaagtcttcctgaaggagaaaacaccttaattggatcttgaaggagttaacctggtgtaggaaagataagccacgtcagatggaaggaactttgtggggaatggcatggaggtaggagtaatgtggtggatgaggaaaaaccaagcacagttcagcatcatcagaatgatgtgtgcatgtggcatgtgcatgtgtgcacaggtctgtgcgtgtgtgcatgcatgtgtgcatgtgtgtgtgtgcatatgtgtataattgtggggaggggctatcaagaaaagaagccaggctaggggagggatagcattaggagagatacctaatgtagatcatgggtcgatgggtgtggcaaactaccatggcacatgcatacctgtgtaacaaacctacacattctgcacatgtatcctagaacttaaaaaaaaaaaaagaaaagaagctgaagaggtcagcacggccagatcaagagagtcttgaatgtgagggtaaagaatgtgactctcatcgtggaaacaatgggtgaaccaggcacatgggaggtttgcatctagaaaaatctctagggcagcaggaggggcgcagggtggatttgtgggggcaagactggggatggtgggatgctgtggccatggtccgggtgaagggcaagaagggcataggcaggaacagagggttggaaaggagagggggatggagagagaaggccagaggcaccaggaagagggcagctggagcagacaggaagaggctcaccccaggctctagcggcagaactcacccccagggcacctttccagaggtcacagctctgaagatccagggaaacaattttcctgatttgttctcaggtaagtagaggcagtggagagaaagcttgttatctttattgagaaagaggaaagaatgaattgaaaaatgaatactgggatctttagaagaagaatgtaggaaaaatgtacaaaattgacttgacttctccttggacccaatttagaggttttataagatagaagagctacagaaagaaaactggagttaagcctaatggatgccggagtgcactgcccaattccccagctgcggggcggcagacagctctcagctgagtccctccctgggattcgcgtgggccaaggtcagatctgcttcctggggcagtctgcacccagtgcctggttggtgtggggtacaaaggcacggtctccttgacttaacttgggccattttcagtgttcccattgggtacgctgaggcttgaactctgactgcactgaagttcaacatccccctgcacccagtcctttctttactcccccactggttgtgatccacacatcactccttaggaactgtcctggacccaagtctgtatctgaagtcggcttcctgagagcttgatttgcagtgttagaggagtgaaattaagtgaaccctctaagaggaggaccaaactgggttcttcttttctaggaagatcggtgataagcatttgtcttatcagggaggtgggcgaaggtcttttctgggactttggggctggaaaagtggtctggccaagtccccagagaatgggctctgatgtcagagagacctgagtttgaattcctgctccaattgatcaactctgggattttgaggtcctatcagctttctgcccctcaggtgcttctgtaaaacaggaatgatagtcatacttacgttgcagtcatatttattttcccaaacatcgtggggccaaacaaaatggtgctcttgctgtaattcccagtgcttggtgcgtagtacagtcctcagtgtcaaaggaatggccggtgagcaacgttgataggaggagtcgttcaggcggcgttgccagtaatccaggtgaagaatgattggaaaatgtattgtggtggaatgaggaggttattgctgccaggacctagctgagcagactgatccaacccacacatatccaattcctgaaatagatcctagcaagtcagctcaatcgagaatgttttgagtcatccactacagatgagatgctggcagtggggacccagcatgttggccattttctggagaaccctaatttacgactctgttagtggctgagttagagaatttattttgtgagttaaagaattttaatttatgtcatcattaagtacagtcatggcatagaacaggtgctcagaagatatttactgaatgaaatatgttatataagacacttcaagtgctttagggccagtagaatttatctcataccaagagtgagatatttaaaaaacaaagatgatatgtcccagaagttagccagatgaaaaaaaggaattcactgagacagaatgaagtatgtaacccaggagcattctgaagtctccctgggatcagtgagagataggatgggtaaaagataaggcacagagagttctcaatggacttgaccctgcttatctatgctcacaaaatgagctaccagaaggcagaacacaaagcacaggtgctccctaaggaatttccatatttatgtttgagtggcttttggtgctatctatctattatcctgtttatattggttccagttttgcatttcctgagtacacaccagctaataataaggggccagagccggttatatattggggaagctgtcctccctgggattaaaactgtggccatgaataatccacagagaggagagactgaaagctctaccctgagaggaagcgagtcattgtggatatcttttggattcagatagttttcccatcctaggtgagacaccaccctggggattggaagttcaaatgtccacggggcaaggcaggtcagataaatgaggaaaccgtctgggaaaaaagcaaaaaagaacggtgcctgtgtcctccagtgggtggctgggtaaacaaaccaccgtggactattactggccagtaaaagcaacgcactattgatacctgcaacaagatggatcaatctacggggaattacgatgagtgaaaaaaccaaccccaaaggccacatactgcatgatttcatttcgataacattctccatttgacaaaattatagaattgaagaagagattagtgtttgcctttgcctggggctgaggaggagcaggataaggatgggtgtgcctatcccgcgggatcctgctggtgactaaactgtctgtgtcttgactgtccttgtcaatatcctggttgtgatcttgtattagagttctgcaagatgttacaattagggggagactgggtaaaaagaacatgggatctctctgaattatcttgtacaattgcatgtgaacctaccattatcttaaaacaaaaattcaatatgaagaaggaagggtggggactgtggtaaactagacagcacatgactcttttaaagggcaactgtgtttttttagaaaaccaacatatagtacaaacccaaaataacaagcacctccccgtcgactaaccaatcaaccaaccaacaaagaaataaaaatatctgtctacccacttaagctctcaaactttttttctagagtaaccattttagacgtaaatccttaaaaaatgtagcacatattcctccacctttttaaatgtcatctactgaatgtagcaaatcttctcagctgctcattgaatcaagatttcttcatctgcaaatcattgataaccttgctggaaatggcttaaccaccaagagaaggctatttgtataataaaaagttgggatagaggatgaagatgtttagggctgtttgaacattattctatgaagccctgctgccgtgctttgtaagttttagaattgattttagggtttttctgtctcctcttttactgccaggctcatagtaatgttttcttgatactgtcagcatgcttgcatgcagcgaactatcatttccttctcacttactgggagcttgaaagtggataacaaaactctctctctctctctctctctctctgtgtgtgtgtgtgtgtgtaagtaagagagagaggaagggagggagagacagaaggagggagatagagagagattgagtaaataggcattgagtgggaatcggagggactgaatattcacgcttttgtgtatagtctttgtaacatcccttttgactactcaaaggccttattgatttcaaatagtcaagacttctgagacactgcattttgagaaggtaaaatgaaacttaaaagtggaaattgcatgttgcttatttcagactggccagaataatacttttgagaggcagcttgtgagagggttaaaaacctaggctctggagccagactgtctgggtttaaatcctggccctacttcatgcaagctgtgtgacttcttcaggcaagttacctaacctctctgtgcctcggtttctttacctataaactagagttgatgataataatacctatctcatagtgttgttggaattaaatgaactgatagatgtaaaacatgtagaagggaatctaacacataggaaatgctacatatgtttgtaaatatgaagcggtagatgttgccagccactactctccatcttcctgtaactttctctcccagcaggtctggcagatttttgaccataggtgaggacacatgaagcagttttctttaggttcctggattattatcatttggccgtatgggagaccccagccttcctctagaccgtgtctccttgggacccatgaatttaggatgtggaagggagagtgggagatgcagaaggcttcatgtgattttcctgtgcctgaacctgccattcctctgttctcacgatggctctggatgccccttctatcccttctgtcatctgtccctctaggtgcaagttttagattccctggagagaccatctgactggcccagcttggccaggcgtgggcatcagttcgagcctggggagtctcaagtggtataagcagtgtaaggggctcacgatagaaggcatggggcagggatgaagtcactgtcctgagctgggcaggtgctcagaaacggctcattacattcatgcatcagactagatactgcactagggagacctggggctgcagttagctgcttactagcggggtgtctttagggaatccattttaccaccttatccttcagtctcctcattggaaatggggaagttggtgatacctgtatttcttacctcaccagtctaggaccagctacatagtttgccggttccagtacaaaatgaaaacatgggacacttttttccagcatgattattaagacagcaacagcagagcattaaaccaagtgtggggtccttttaaatgtaaagtcctagggaggttgcacacccaagaagctgccctgcacaagatggtgataatgatctcatgcaaagccatatagcacaagcatcatacatcttccgcttgtgtgtttcgtcatttaatcttaaaatgttctttatttttatttatttacttatttttgagacggagtctctcgctctttcacccaggctggagtgcagcggcacgatctcggctcactgcaacctccgcctcccgggttcaagcaattctcgtgcctcagcctctggagtagctgggattacaggcgctgccaccatgcctggctaatttttgtgtttttagtagaagcggggttttgccatgttggccaggctggtctcaaactcctgatcttaggggatctgcctgcctcggcctcccaaattgttgggattacaggcgtgagccactgggtccagccaaaatgttctttaaaagaaggaaacttggctgacactccgtggagaggtgatattcagccgatgtgccctgggacaggctggcctattgtcacatccctcggagttggccggcacccatgctgttgagattgtgaagcagtttccagcatcagccccatgcaacactcatcagagtgaaagacaagggtttctgctgcctcttgttctgttctggccttcaccatgctcagagggaagctccatgaggggaccctgcaggaagttcaagaacgtggctgggaccacagccttgcgaggtccgtgcctgactgccacctgcccccacaggctcacccggcagccctccctggggaccagcatctgggaggggctctccagtggcaccacttggctctcagggaagggaatctgtgttggtccatttgtgttgctataaaggaatacctgagactgggtaatttataaagaaaacagatttatttggctcatggttctgcaggctgtacataaagcctggtaccagcatctgcttctggtgggggcctcaggaagcttctgctcatggcagacggtgaagggggagcaggcccatgacatggcaagagcaagagcaagagcaagggagggaggaggcggcagtctcctttacccagctagatctcacatgaactcatagcgagaactcactcaatcctgtgaggacggcgccaagccattcatgaaggatccgcccctactatcctaacacctctcaccaggcccatccccaacactggaggtcatgtttcaacaggagatttgtaggagacacacatccgagctatataagaattcattcccctgcagaagggagggtggccttttcatcttgaatacaaaacaaatcatttctactctaccttcttttctcacttgagcccatccaaaactcatgattaggtcatctcattgtccactcgcctagtccactgctggactaagcactgtccttttcacaggcttctgtctcagtgacagtctgtgacccccaggggctgctgtatcaatttcttgatcagaaggggctctggaagttcccttgcttctagatcttctctctccttgcttctccttcttatgctcctggcgtcgaggacttatgccaggttgtctggaggccccatcttgctcctgttccttcttgcctccctgcaaacatattttggagtctggaaaagtgttcttcagtaccacagagccagtcatacccctacccaactcccaccaactccccactttctggtaaagcttctccctaactttcttctgagaagtccctgttagccaccaatggtctattagctgacagaatggcctgtagaaggggaaggaggaagaagggagagaaggaggaaaggaacaccacctatccaaggaaattcaagataactgcattcctcccctctgaaataatgaagggagcatgtgtctcataattcagggcagttccttctcttatgagtggccggcattccagatcctaaggcagccgcttggaaatcaatacactttgcaaagaaatgttattatgcctcatgcttctcaacccagcccacagaagcatttttacgatgtggacctgaagcactccaccaatcaaccaggttcacaacccccaaacccctgtaacgcggtctctgtgatatactgatgaaagctgtgttacattttggggtactggtgacagctagcagaggggataccatcctccagggtgtagcagtttgcatacctaaagatgcttctaccttctggaagatgcctccccagctatgaacatcctcataaagacagtgcctttttgggggcatacacatcccaacgggcaaaatatgcccagtggaggtgaaggctggactccaaacccaggctctcctgtggccctttgctcacaagagtgttagagcatcattattatatatatatatttttttctcagagagcccattttgtatgcattctctgcagctgcagacctcaaggacttgactgtttttataatgatgatgaataaaagcaaagtctttgaagaaaaaagttcattttgatttttcaagacaagtcagcagcagccccagagactttgtagtcctttttgccctgtgctgcctgcttggagcttcacattcatgtgttgtttgctgtaactgaaaaatgcctcagtctctggaaagctaagtggatgcaaatggatttggaattgtcagcttgaaacagtctccagtggccgggagccccaagacaactttgatggccctgacagagccgcccttgtagctcctcaggaaagccggctgcctggcatgcttcttgccatctgtagctatctgggacctagctctctatttatgaggctgcaggagatgaaagcagaaaccacgttaattattgcaaagtgctttttactttcaaaagtgctgcactagcgttaattagttattccgacttacaacactctggtgaggtaggtcagattattacccctttctaccttggaggaaatgaagacacagaaatttaatgactccccaggggacctggaagaagttggtctcctagacagagttaggttttcaacgtggtgtatctggcttcctgccagggtctgtgcctgttgccacaccttgctgctacaaccagtatcctcagagcttcttaggcagggacaacttctgtctaccattatcagaagaaatgggattttccagaggctctggtgggtggaaataaaggggaaagattgctgttccttttccagtccacaccaaggcaaggaagcttctttcttggtccttcacccctccgaagaaggcaaggtttgggatgaaggttgctcctggtcagatgccccatgaggtggtggagacggggagggagagagagcatggggatgaggactgttagtagtgcttttgtgccaggcatgtgctttctagatgatttcccatctgcatggatcagaaagcagagatactgatgcagctgcctttcattattgggcagagagagattaagtgttggaaaaaaatccttccttatggctgggtggcagggagaggagacgtgggctttggaatcagacagctcccggttctcatgctggctgttcagctcctagcctccctcctcatctgtaaaatggtggtgatgaaggaattcgtagacttgaagtgtctggcacagacgctgtcatcaccttccccacatccaggatgagttcattttggtcttttcacttcagaccccctactttccaacagaaatctttggatgaccttggattatcagacatcctccagaactgctatccgcgtgccctccttatttctgcacagaatttctgaacctctgggctggcatggtccaggtggggctcacatagacagtgggttgtaaaggaagaacaggcacaggctaagaaaagaggtggaggaggaagtcgcggttccacgatgggggaggagaagaagaggcagcttttgaaggagctccatcgcccacccccagcatcgacccccgacggggcccctgtgcctctcttaggggtggattgtggagaggagagaggcggctggttcagtttgggatccccgatactctaggacagcccccatcttccctcgcttccgtgaacacagctcccaaggcggtctctgcatttggccacagcgttgcgtcttctaagctgctgcgccctctgggagccggtggtgttcagtcccacagtggccagactgtcctccgtggagggaggtgagacaagacagtaggtgtttttgtgacccctggtgcagtgagaggcacctttcttctgacacaacctgcccgcaagagccctcacgtggcaacttgccttccccttgaggcgccccgggccacttgtgtgctgggcccctcccctgtgttagcagagaaatctctagtccttgtgggccgctcaccgtggctcacgcctgtaattccagcactttgggaggccgaggcgagtggatcacctgaggtcaggagtttgagagcagcctggccaacatggtgaaacccatctctactaaaaatacaaaaattggccaggcgtggtggtgcgcacctgtagtcccagctactcgggagtctgaggcaggagaacagcgtgaacccgggaggcggagcttgcagtgagccgagaacgcgccactgcactccagcctgggtgacagagccagactccgtctcaaaaaaaaaaaaaaaaaaagaaagaaatctctagtccttgacttgcaaagcttctgtccagaactgctggggttcacaacccatgtgtccattaactagctaggggatcttgggtacattccttcatggctgggtgtcttgtttttaatccacaaaatgggagaataatgatatcagtcttgctaggaggatcaaatgagttaagacagtcaaagcacttcaaacagagctacgttagctattatgagtattattgttaactttagtgtgctgtgagagggtggaccctgcctgggttacagggcagcaggaagcaatttggttcaattctcttgaatgtgggagagccagggggtggtgggcacgcttctactgcaatctccctccttccttgaaagatttgtgtgggtcagtggacaggaaacagataattctaataaaggaatggcctccttgctactttctgaataaattccaaatcccttagcatggcattgaaggcctgcccgggatctggcctggactcatcgcaatagctctggcgcacgcagtgggcatggaatatgtatgtgtctcctgagtatggacccgtgaaagccttttctaccctcctcccccagaggccaccagctctggtttattctcactgctcctaacaccttgaaacttcatgcctccatgcattattctctccaaatttctcctcctaacaggacccatttcctaagttgcctttaccctaaagccttttttggagtcttcccctctttcaccttcaaattaaatcacatcttctctgtactgcattgtttaccccactaccaaagaagttcgagcctgggcacgagggctcacacctataatcccagcactttgggaggctgaagtgggaggatcattcgaggccaggagtttgagaccagcttagcaacacagcccgaccttgtctctacaaaaaataataaaaaataaattagctgggtgtggtggcgggcacctgtagtcccagctactcaggaggctgaggtgggaggatcactttagcgcaggagtcgaggctgcagtgagctatgatggcgtcactgcactccagtctgggtgacagagggagaccctgtctcaaataaatgaataaataaataaatagataaattttaaaaaagaagtttgcgtgtgcgtatgtgtgcgttcatgcatttggatgcatcccagccacctgtctttctcccagcccatctgccaaacagcgctagagggataattctaaaagcaccagttgagccctcccctctgtgttttaactggctgctgtaattaatgccagcacgtgacatttgttattttacataaccctcacgatctatgaggtgggtattattatgcccattttacagatgagaggatggaggtttagaaagattcagtatttctcccaagattgcaccattagtacaagcagggattccatttgagtgtggctgacctcccaaatcaaggcctctgacccttagctatacagcctgtactgcactccacgggtcaaaaacccaaaatgagaaacagccacgctcctcagcagacgctgaagcctcggacctggtttccagcactgccctatgtgcatcatggtccagcctcatgggtccgtgtgtgttacctagccagcccatctctctgggcctgggccatggagtttcctactgcctctgcctggaatgtccagctgcccaaccactgtgaaaacagtgagttgggtcaagtgttagctcctttgggaagcctgctctgcctctccctctctaatcttcgggaataattaggggctcccttcctgtgccccctccggtcttccccagcccttcctgcgggcagctgtgtgctcacatgccattccaacccctggacagtctgtccccagaggtcgtgggctttgctgtgtttgtccttgtatcttcgagcctggctttggccctgaccacacatgtgtggcactgtaaatgctgctgaagtaatagagagttgggtaaatgacgatcgcttttctgccttgctggctgcaaatcccaccttcacagagcaggcccagaacattcccatggtgctgggccaccagggagccgtttggggaaaccaagctaatattcttctaatgtttaggaaaaataggcggtttcactgcaggtttcatcgcaggtcacctgactggcctcgagggcagttcaagtctctacttaaacacctgagaatggatgctgggccactccctggggatcattttgccccatgcagtaattctaccaatctgggtagcagaaaggttaagtgacttgctcaaggacccacagaactaagggagagagcttgggatgggaagcagtggcctctgtgctttctgctctgggacccatttctcagcccttgggagggcccactgagggtggggtgcggtttgggctggctttgaaatccttgggatcgtctggcgaagttgagaacagggcagcagccttgcttcagaagtcttggggctgctctgggtacctgagctgctgccccggcagcaggaagtaatacttttagagctttagccccaaaacctcagaaactttttgatgatgcattaaatgtcaagtatattgttgagaggtgaaaaaaaaaaaaacccaggtatcagcctttgttactgagatgacaggagatagtaatattacaggaagtcatactgtcaaaataatagagagggtagtgtctagggggccacaccttataataactgtacttagtacaaaggagatttcgtgtgcacctccgcatctgtgcactctgaggtggagcccggagaggaggtgtagagagaagaaggtggagtctgctctgcgggtatctttgctttgacatacaaagcagagtttaactcaaagactgctttgtctggggacagactactcaggcttcaggccaattaccatgaaaattcacgttaaaaaaaaatgcgtaattgaagcaaaaggatttttaaatctttttttttttttttgcctaaatgatttgtctacttagatgataatttccagataattgcagcattttggaactggaagggactctaaggggtcatttttccccactgatgagggcttcacagcctgcagatggacttggttcaggtcctcagctaggtgatggctcagcaagtctggcccctaggcaccctggccccatgcctgccacttcctgcggccacaccctgcccaccctcccatctcctttccaaatgaggtaactccctgggcaagccttctgttctgtaggacaagttatctagcctagcccctggcatggtataagtcctggacacatgtttgctgagagaataaacatgagttgggcaggaactgggccaggctcctccacatgttgtatgtgaagcctgtaggtagagctggttcacagcctggctgtttaaacatgcagggacttaggctgcaagcgggtgtggaccgcatggtgtgtttggaagcaaagcaacattcacacgctgtagcgaaagacatctcccttccgactccagacgggagctattctctcccttatttctgtctctagacctgaccctccttcaagcctatctctccagctgcctgcctggcacctccactaggatgtgcagctggcatctcacacttgacatggccaaaccagtcttcttccatcttctgctcggttacagcatttatctactcattaaatctaaagagtcgcccttagttcttctgtttcccactcctccaagcacactcaatctaccagcaagtcccattggctttgcagtaaagaatatacgtcagattgggccacttgtcaaccctctacctctactcccctcattcaagccaccaccgtctccctgagctctgggtcccgcagctactcctattccgggcagacccatgcttgctcccatccctggtcttggcgccactgtgccatcttcctgcacgcgcctcctgcctctcggatggctgcctcctccttggcatcagcctcctcttggctcggacatgacccattacagaggtcctccccgactcccatctgagaaagtccccctgctccccattactcatcactttactgttttggttttgtgttcaggacacttattaccatcaaacactctcttacttactgatttgtctgctgtcacctccccatgctaaagggttaatctccaggagggcagggactgtgtcagcctcacggcaggagctcagtcagtgctgcctgcagtgagcaacacactggcatctacacaagtctctgccccctcttcctctctgtcattcgcctgtatatgccaaacagctgctgaaaagccagaagaggagttcaaggacactcacacaatctttgaaaagacatgggttttatttcctctccttaccaccatggcagtgcgaggggcagcgtttctgctctgcgcacctccatggaggcacgcacacaaccttgctgtggtcagcacaccctcatcctcactccgctagtgagaagacccaaagctctgcagggctcgggagcacaggtgtgtaggcaggatccgtgccgcggctcttgctagctctgctgcgaagtggtcccacgaggacagtcattcattcatcatagggagactaggaaaggcttgcagcttggttctcccatctgcctgggtgctcagtgcttactggcagggccgctgcggcctgggcgtgtggctttcttgcctgactgcacatgcgtctgccagtggctctcgagcacccatagagagcttccttgtccaggcttcttgccaggacccagggctggggacaaatgtgcaaatgacagggaccagctctgtaaggaagcaacaactgcccacatctccatctgcttcacctgatgctcgccatcgtctctgggtaatcctgccccaactatgctggctacggttgcagataaatgtttcccatctcacatggattgagagcttgctgtgtaccaccgattctgtgttttatgttcccttacggtttaatccttgcaaacaatcctatgaagacagcctttcaaacctcgtttttagagtgcaggaactgaatgaaactcagagaaattaagtggcccacatctagtaagtggcagtccaggagtcagctggaagtcttccaaacccaaactcatattctcatattctcatagtccatgacctggacccacagtgaccatctgtcccaagttgcccaggatgtgggaattttactgctaaaactagaagagtcccagacaacctaggatggttggtggcttcacctgtgcaggtgaggaggtgatcatagtcggtccagttgagtttaggcctaatctaggtttctgataaaaggaaaatatatcctttttcttccccatttccttctttggccttttgctagtcagcttttaagatgcatgtgttcatcttttgtcattgttcctaaatgacacgtattattaaacaccaatatttgaagtttggtaggagctggcccttgactccaagcttgtttgggttgggacattactttttaatgataggtaggtgacatggtttggctctctgtctccacccaaatcatgtgaaattgtaattcccactgttgggggaggggcctggtgggaggtgataggatcatggtgggagatatcccccttgctgttcttgtgacagtgagttctcatgagatctggtattttaaaagcatgtagcactccccccttctctcgctccctcctgctgccatgtgaagacgtgcctgcttctcctttgcctgtcaccaggattgtaagtttcctaaggcctccccagccacgcctcctgtacagcctgtggacctgtgagccaattaaacctcttttctttctaaattacccagtctcaggttgttctttatagcagtgtgagaagggacaaaaaagtaggagttttgggtttactttatattcaccttcttccatttttaagttgtgcctttgttgtccttcatgagataatttagcaagtcttggtcaacttggaagtgattctacacaggttgtgcagattgtggggtcaatgttcacagcaggacagcctgaggaggagcctatggggagccttgtctgagggtggacctgctgaggctggtggaaagccggtgtcctcctttcctggggatgagggaccaactccagggctccctgatgtccgctttgatgacttcacatacaacgtgtggctctagtgactccacaaccactaagccgtttcaccaacaatgcccagacggaccattcttagccattcccccctactgtctcttgtctctgtttctccctcttctcttacctcccacaaaatagcctttgccatcttagtttctcccgaggctaatttcaccgaactttttgctggccagtgagaattaacttcagttaatcagttaaagagattattcagctaaaaggtaaacaggggagggtatttctagttaattagtgagaaagaagttaaaaagtttaaaggactccttgatttgtagtatgttgtaactggggagctggaatcggtgttacttctgtaggtgctgacacaaaatcagtgggggtgaggccgaggtacctggattgtcagtggcctcccacaccgccctgtgattctgatgcaccccaaagtctgagaactgttgccctgacccaattactcccacagccccagagcacggcaggggtccttgtacagggccctagttcccttgcaatctctttgccttttagttttaaaactagctattcatcgctggttagttaactgttatgcatttctacaggactgcattgttaggagcctcgacttggcttctccacaaccacattcaacattggccttccaaacccactccactcctgtgctgtctattgcaggcctgtgccctcaccatgcgcccggtccggtctggaaacccgagtctctgtgtttccgtcccctctggcttggtcctcaagcctctgcatcttccctgggtcattcaagtcttccaggtgatgcctatattgttagtctctacagtctggccttacagcatcgtcagagctgccctaaggcccaggtggagttgtgggtcctctctccgctgcctccctgagttctgactcttggtgtgttcagggacttcctgcctccgcacctcccaccccatgctttggccacagcacagactcttctgattccgtagctatgcttctgcttttccctccacctggctgctctggtcatagaaattctacccctcacttaagaacacccccagaagtcacctctgtgaagccttctttggttcttctaaaataagtgagttgctccatcctctgtgtctgccagcactttctctgctcctctggacttcattggtcgggggtggggggtgctactgttggtcttgcagccaccctggattgtgacctcgcagaggtcaagggctgtgctgacgccccccatgtctgcgtgttgacagcagacttactggggacacgctgtagagctccgatgatggctgttggccgaatggatgaatggcttcattaacttcactgcaacacgcaggagtccttgatctccccccttgaaaggtattgggggtttccctagacactgccacttcaaagccatacagaaaaaattagagctaaaagaggcaacattgtttatttctcaagaagatgctttggtgttccttcctgcagctgtgagaggcctcctgtttgaccttgacgtttccctgtcaggctacacagcggttaaaggcagggccccggagggtgtgccacggtgcccagagagggaggggtagtgggcgctgccctccagactgcgtccccagtctgggagaaaggggcactcgtcctgactggattgcccagacgggcacccctttcctaacttgcctgcccagaaagacatgtgtaattcctccacccggagggaatgatttctgctaactcacagagaggctttgacttgtcactctgccttctagaagtgaccacatgttttttttgctctcggcaagggggtgcccttggctgctctccggtgtgggagtcttccccttaatccttgctcctggacgtttgcattttcacaacgaccctttgtggcaggtgggtccctgccttcttcagatgaccttgaataacactgtcctctgcacttctggccgccacggaagaggcatgactgctgtgagtctggggccttggaaccattttagaccaaggcaggaaaaataaacagatgggcgaggtaggtggctgcccttgaattctcactctcattatgcacccattactggtggccagttgagtaagcatttaggacttggctttgccatttgtcagctgattaaacaatagagctttactgagcagctcccatgggctcgtgtcactatacctattttacagagggagaaactgagtttcaacaaagaaattgcaccgaacccagaactaaacaggaccgggctgccagagggtgcttttctgtgctgaatcatgggaccttcttgctgaccagagcagagaagaaaagtctcctgtggtcggtggagtttttactttttggattttctcccctatgactgatctcagtccttgcctggccactcctgcctgtcctacaaacaccgaaaaccactgtccttttctcagccgtcatttagcagtcgggaagcgtgtgtcctgacgtatgggctgcagtcaaggcgggggccctgacaaacaggattcattcaccaggccctggcctgccagctccctcacgggcgtcacatggggccgaatgaaaagagcagggggtgcccgccagggaggcctatccaggggctttcttccccgcggcgccgttccctgggcctgccaagtcccacgagccagcacactggagaagcgttttcaaagcgaggcctttgccctccttgacaggctcctcaaagcctgcctcgctctggcagtgcctgggagatcctgtgaaaggcgctttttgttcaccctcctcattggggacatctttggggagccactgcttgagaagcacagtgtgagctggaggacacttgaggcagggccacttcggtgggcagcgggaggagcagagtccggggagccgggcaggcagggaaggcgctggaaaacgcggagactgctcctgggaagcgtacatttcataactgagaaacactgcccagaagtttcttttagaagtgggaggcaaagagcgcttaacctttatttttatttttatttctttagttgcacggctgtgtttggtgtacaaataacacctggggtctgtggtgatgggtccttaggaatagagagaaagagaaatggccttggaatttagtggcctgaagacatagtttaaaaattcatttccggacctcaacctacggcctttgacagaaagatgggtttgttgtctgctgtgaaataaaagccatctgaggcttgtgggagcatgatgagcaccagagtccggcttagaaatcacgctgatggcccagaaaactcagccaaccacagataccattgctgcttctagaagcccaggacactggcactgtgaggcaatgctggagattcgtcctatccctggtctcttgcaaacattttaaattgaaacctttaatagtcagcatgagagcactcggattcaattatattcatctctgaagatgtcctgatatcgcctacttgtttataaaaattaatcataaaatattgaactagtggagggtttgtatgttttctataaagtctaaaaaatgaattccatttggatccagtgaaaggtgaattaacgaattattccctcagtaggacaagaatgttgaagaaaaaaactgaatgatttttcttttgaacaattcttagccaatacaaacaaaaaaaatcaacaaacgaaagcaagccaaacaaccaaacacctctccagtattgcgtttagaccagtttgtacaaagttggtactggttttatgacctaactttttcccccactgtttaaatagatttggacattatctttcaaatatgccatttccaaggaaggtctgagtgggcttgcttttgcagtgcatttacaaagcaagctatcgaactggctcacaagccaaacagaggcccctgaaaagacaatatcccttccttcctgaggcagatatttcaggattggggaagcagagtttcctgtgttctcacaaggggctgagataaagaaacccagggcagttttggaaagaattcagcctgccacaagcacgaggctgttgtttttgtgtgcagggccccatttcacaatgagaggcctgcctggccagagtgaccgtggggacaggacgtgatgtggacagggctttggagctggaagagtcctctcaaagtgtgatgttgagaagcagtgatgcagaggactccctggaatggtcagcacttctctccctcgtcccacctcttgcgccaacccacccaccatcctcacctttgattatccacacacgtgtgtcttactgctcctcttccgtaccatgagagcgtcagaaatcttagtgccctctgcgaatgtttatttagtttccattatgttttccccttgtttctatgatcaacaaaaggcaaaacagagaagtaggtattcgccttcaatgtatttccccatctgtcatccgatttccttttttatgttttctccacccccagcctatttactgtcctgcatcctgtaggagcctctactgcaatgaatgaaagtaatctgacagcctgggcaacatgtgaaaacccgtctctaccaaaaaatacaaaaaattagcagggcatggtggcacgcgcctgtagtcccagctactcaggaagctgagctggggggatcccttgaacccggcagggaggcagaggctgcagtgagctgagatggcaccactgcactccagcctgggcgacagagtgagactctgtctcaaaaaaaaaagtaacttgagtatttaattcatgcagagatattgatgtacgataactgtagcctctagccagagttttattgcatttaaaagaagtccatgaaagaaaaaaaaattttaccaaatgtaaaagtaataacaataatgataataatacagccataaggaagaaaaaaaattcaacaacataataacaagtgtctgttgatagggattaaggcgtaggtggaaaggaaatgggaggaaatagaaaatcattaattttctcaccttttgtatttgggagataatagatactatttgatttctgattaattgataatagaaaattaagcatcttatttaaaatcgaggaggtaaccactattaggactaaaattcagattacacagaaaacagaggaaacaataaataaaagaaattatttaagatgatagaattgtgacaaatgtattataataataaatgtaatgagatcaactcatttattaaaataaataaactcacaaaaatgggtaaaaaaatctaaatacaacattgtactgtctttaaaaaagtaactgaagccaagtgactcagaatcggagatagtgcttcaactcccagaaatatccctctaacagtggaattccaggcactgtggcatttgggaggggtagatatttttggactaagctttcctagcctctaaaatcagaccatatggttgccagctcataagaccaaccctgtgtgcctcagtgtttgttctagattgctgagcttccaaagggcaggggctgtgcctgctttgtttaattccaggcatttcagagaagttccatgtgcagacacgtgttttggtgtggaagagttagagaagggcaggattagggacatttgtgcttcccagtccgttaggtggagtgtctctggtagagaagcctctcaggaagttatggtggctactcagggcctcgagtgtgctgtttgatgtctccaagcatttgcattcaatggatcagcacttgatttatcagggttcacctatgggttatggtttctgagaggcagaatcaaacagacctgggttagaataccagctcttccacttaccagctgtatgatcttgggagaattacttaaactctgtggccctcagtcaactcatctgtactatgcttcattcattcattcattcattcattcataattcaataattactcattgaaatcttactatgtggtggtctctattctggattctggatattcaaaatctctgctttcaaggagcttatattctaatggactaaggcagaaaataaataaaaacaacaacaatcaacaaatacattcataatataccacacgagataaatgatattaaaaaaggccaagtggggtgacagaatagattgatggtgggatgtgtgagttgtgtgtgtgagtatggtgagggtgtgtgagtgtgtgtgtgcacatcccagttgctactgtagatagggtggtcaaggagagtctgcctgaatgaactgaatgagctgtctggagacttgagaaaggactcttccttgcagaaggaacaccaagtatgaaggctttgtggcagcagagaagaggctgcagtgcagtgagctgggagggcagcaggattcgagggcagagctatctgagagctacacagagtattccaggccatggttaaggactttggattcttcctggaggtagctcagaaaccactggaggagtttgagcagagcagggatgtgatctgcattatatttaaaaaggatgacgctggcttctgagttgagaatagactgactctgcagacatggcagccacaagatgagttaggacagatgacggagtctggaccagaatgttgcagaggaggtgacaaaatggttgactgtggatcaggtttttttttttttttttttttttttctggagacggagtctcgctctgttgaccaggctggagtgcagtgacacaatcttggctcagtgtaacctctgcctcccaggttcaagtgattttcctgcctcagcctccctagtagctgggattacaggcgcccgccaccacgcccagctaatttttgtatttttagtacagacagggtttcaccatgttggccaggctggtctcgaactcctgacctcaggtgatctgaccacctcggcctcccaaactgctgggattacgggcacgagccactgtgctcggctggattggttttaaagacagagttgaccagatttctgggttggatataggatgagaaagaaaggaaggaatcaaggatgatgcaagttttttggtctgagctactgcaagaatggaactgctgtagactgagctggggaagacatggatggaagggtggtagcaaaagttccattttgaccacatgaaatgcctgttagatagagaaatggagacgttaagttggaagttggaactaaaagattgggattcagggagtgaagtcaggaaggagatataaatttggacaaagcaattacaacctttttagactggacagcattgcatatggggtgcctgtggatagagaagagacctgagcctgggtcctgccaacatttgggggtcagggagatgaagaggagctagcacaagagtaaacagccagttgggtgggaggaagaacaaggaaggtggtatttgggaagccaagtgatgaaagagtttaaggaggatggagtcttcagctgtgctaagggttgttggtggtcaaatgaagtgagggccatggaataaaataacatttgtaaagcacttagcacacaaagcaaatgcccaacaaatggtagcactagtaaaggctggtcagtacttaaagttccatagttagagatgccttcatttgggtgaagatgcccgggagggatcctcgttctgatgaggggtagggtgagagatgaatacactgtatgtgaatagggacaaagattctctgcttggccaagctgtagtccaactcctcaacgttttcctaggccatctgtgcacttccttgtaaaatccgttttaacaaagagccctaatcagtgagtttatcaagagctcccatcctccatatctgttcacccttgtatctaatcaggctcatcatcttcctccatccctaggtgatgtctggtcaccctgggctatattcaggaagaatcctgttaggtcggtttagccacagtcccccttatccctgatgtttcctcttagtaattttccattcatcgacccccactctgctccttggctgtaaattcccatttgtccatgctgtatttggagttgagcctaagttctcccccaccaccaggccccactgcagtggtcctcatacctatcatgatggttctgataatgtctgccttatcatgctcttttttttttttttctctgtggcccaggctggagcacagtggcatgatctcggctaactgcaacctctgcctgcctcccaggttcaagcaattctcctgcctcagcctcccaagtagctgggattacaggtacccaccactactcccgtctgatttttattagagacagggtttcgccatgttggccaggctggtctcgaactcctgacttcaggcgttctgcccgccttggcctcccaaagtgctgggattacaggtgtgggccactgtgcccgggcctgccttaccatgctttaacaagtaccattgaatcatttttctttaacagtagtaagagagattaccacagaagagagaaggagcataggaagtggggaaggttcctgaagtaagtttctgtgttatagcttccctgagccctgctgctggtgttacagtccacactgaaatatgttaatcaaaccccaattgtttgctcatctttgtacacctgtatactgtctgggtcctctctcgaaggttctgtacctgtactagatttgacagagccttttaggtgtcctgggctcgcacagtaagccagcacatctgactgccctgtgtcctgattgagcttcagtgtgatcacaaacattgaccttaaggacattcttctggatggatcaagacattcttttctgagctgggatacagctcaaaacaggtcttgaggaaggccctgactgctgatcacaggagtaagcaagatgcaggcaggcaggcacagcggtgatgagcatggtcagattgcctgggctcagattcgggttctgccatttgctacccaggtggccttgggtgagttacttaccctttctgtgtctcagtttcctcatttgaaaagcagggatgatgatagaatttagctcacagggttgctgtcctaatatatggaaatcacttaggatagtctctatgtacagtaagtgctccacacatagtagctgcaattttaatccggcatgaggtttcttatcaggtagtatagcctcccaggtactgtgattgggaaattttgaaggcacagtcctcacattgattgtttaaatcatcactgaagttaatctttaatgagaggaggtagcggggaaggtgaccctctggtgggggattcaggcatctaggtacttttcaaattaatctagatggctacgattctctctctctgcctcttcaggctcatcattggtcaagctcttctgcttttgcagagcagtaccagttgttaaacctggagcttcaggctaggaaaagctgtggcaatctttgggctcagccatttcacccacaggtgtcctggaagcgtgggggccactcagcccgtgtgtctccaggatgatggtggtggagccactgctttggtggagtcactgcttctctccctccccctgggactgtggtcaaccactgggccccaccacctcccgcctggtgattcagaagcaccaaccaactgtaccccaagtgagagtgcagctcagctaagtccatcctggctgtcagtgggcacgtgatgctcacgtgctcccccaacactgcaacttaaagaggctgatgttgcagattttggggaaataaaaggtgtcattgggttggcagcatggagtgttggttaagcactctggagccaaaggccctgggttgaaatgctgcctgtcactttctagctagatcacattggatatattacattacttcagcggtccccagtctttctggcaccagggactggttttatagaagacaatttttccatagactggggttggggtggcagtggggggatggttttgggatgaaactgttttacctcagatcgtcaggcattagattctcataaggagcgtgaaacctagatccctcccacgcacagttcacaataggattttgcgcgcctatgagaatcaaatgccgctgctgatctgacagaaggcggagctcaggtggtcacgctctcacacttcctgctgtgcggcccattcctaacaggccacatactggtacctggccacagcctggggggttggggaccctgtattacttaattcctttgagtctctgatatttaaaaggtgtaatggaaccagtcactgtgttaaccttcctgagcaattcagggatagaaggcatacgtgcttgtgtggtgtgcagcaaagtgctggcactcagcagatgctcaatgaatgttcattcgctggtggcaaaatagtggggtgggtgctgtgtgtcccttgccacctggatggataacacgcatctcaacctccacgagtgcaaaataccttttgtatggatcttgaccctggcagggtcctctgtctccctgtttttggtcaatggcatcccctctgcccaggccccagtcccacatggcttctttgttcctcttcctctctcccccatatccatttgtttagcaggtcgcactggttctaccctggtggtcttgctcaagtagagccccaggtgggactcccaccgttgccaccctaatccacagcttcttcacctcccacctcgtttcacctaaaacacagacagacacagacacatccacccaaacccctcacctggagtgtcaagcccccagccctcatctcatgccctctggcttcattccctccctctgcttgagctcctctggccttgctgttctagagtgtcatgctttcctggctcagggtgttcactcttttggtttcctccatttggaatatcttgtctccacatcctgtcgtgaccagctccatctggttttgcagcagagagatggagtaatggagtaagatcacactgacccccctgagccgtttggaatggcttcaggccacctggccctccctctcttctcccaccactttagggcctgtgagagaaattggagggaatgcttaggcacgtgtggcttggtcctaatcctcacgtttcatttgccccccaattctaagaccaagaattttgacttgatcggaattgagttgggagagttggtgtatcacacagacttccaagtatgattttagtaaaggggaagttttctcttcggggcagctacatcttggctttgggttgttggtgctgctgagttctgagttggagtgaattttttgtgagctaaatatggtcttgtgaccaactctcctttcatccaaggcgaggagggtttatgccagtgagcaggccacggattcagttctatttggaaagctagttcacgatcctcacatatgaagtcacagttggcctctggttcagaatagctcctctgacaacaaccttccttcctggatttcagaaagatgtggaatagttcctgaaggctggatggctcccttgacacatctagcctcatgctcaaaatttctttcttcagtagagctaaaaatggagctttttgcttgacagatgtgaggcccagtgaagtggattgacctggccaaggtcatgtggttgatcagcactgatgctgggttctccatctccattctttcagctgggctcggcttcacagtcacctgccttccttgggctttggtctatagcatgtccatctactgtgagagctcagctgtctgaaggaacagggcccagcccatctgggacccccacgggcctccgttagggcatggggagctggaagcacaacatggggtgaggaagaaaagggagagagaaagaggaaggaaggagagcaccagaaggggagagatgggagaaagatgctagaagagaagggctgtgggggtagaggcaggagtggggacacagacggaggtctggggagatcggggctcgaatgtgcccttgaatggcaaacactttggcaggagtctagctggtgaagatggaagatagtaactgcctgctctcttagcattttggactaagttcttctactctcttatcttcttaatttcacagcaaacaatggactattgactaagctttcagagctgtgggtgttctcagagggaggccagccagaacaccagcatctccggcttttcttccaactcccaagttggagctccatctatcagaaatatgaaaccctggaatcttcctcctcctcacttctctgccttaaggtgcgggcagctggggaagagaacattgtgcccagggagagtatattgtgtgagtgtgtgcacttattcatgagtgtgtgcatgtgtatgagtgtgcacaaatgagcgtatacatgcgtgtatgagtacatgtgtgcatgcctgggagtgtgtgtgctggcagtggtggtgtggtagagggtgacaaggtgcatctatacctggccagtgatgtcagcacttcccttgtgcccacctttcctagggaggggctgcactgaattgaaacagtgccagctgggaaatgagaaggcttatcaacaagtctttccttggaggggcaagaaagagctcgagggccgggcgtggtggccacgcctgtcatcctagcactttgggaggccgaagctggccaatcgtttgagctcaggagttcgagaccagcctgggaaacatagtgagacctcgtctctaaataaaaaaagaaaaaagaaaaagctccagggtccttttcttcccttgatgttggttagctaagaaactaccccccaaagttctcatgcccctgtgtctacttagcaaagacacggacctcgccattctgggggactcacctcaaagtctgtataggtgttacatcatgctaatagcagctggcatcttg

SEQ ID NO: 20 - DNA, 19225 bp, Homo sapiens
gagtgactgaaatgtcatcctaacttctaccctctccccagatgaacgggaaagagttttttctctagcccaatctcacgctgataaccgccggcttcacgagccagacctccaggaaggcattagagcagttccccgagaagatccccaatggaactatcagacaaattccccaggtatagctaggtgagattacatgattcctgcctacttgaaaggcttaaaaaggcagcttacaaagctgttaattatgacaagcttgaagagactacccaaggtagagacgaaaacccagcccagttcatggccggcttagcagcaacctttggacgctataccgccctagacccagaagggccagaaggccgccttattcttaacatgcattttatcatccaatccactcctgacattaagaaaaaacttcaaaaattagaatctagccctcaaaccccacaacaggaattaatcaatcttgccttcaaggtgtacaataatagagaagaagcatccagacggcaacgcgtttctgagttacaattacttgcctctgctgtgagacgagacccagccacacctccagcataggagaacttcaaaatgcctcagccgcacacgcctaagccgcagcagtcaagcattcctacaggacttcctgcatcaggatcttgcttcaagtgccagaaatctagccactaggccaaggaatgcccacagcccaggattcctcctcagccgtatcccatctgtgtaggactccactgaaaatcagactcttcaactcacctggcagccactcccagagcccctggaactccggcccaaggctctctgactgactccttctcacattttctcagcttagcagctgaagactgacgctgcccgatcgccttggaagccccgtaggccatcacggacgccaagcttgaagtaactctcagagtagaaagtaagtccgtccccgtcttaatcaatacggaggctacccactccacattaccttctttccaaaggcctgtttcctttgccttcataactgttgtaggtattggcagccaggcttctaaacctcttaaaactccccaactctggtgccaacttagacagtactcttttaatcactccttttagttacccccacctgcccagttcccttattaggccgagacactttaactaaattatctgcttccctgactattcctgggctacagccacacctcattgccgccttttcccccagttcaaagcctccttcacatcctccccttgtatctccccaccgtaacccataagtataagacacctctactccctccttagcgaccgatcatgcaccccttaccatcccattaaaacctaatcacccttaccccaatcaatgccaatatcccatcccgcagcatgctttgaaaagattaaagcctgttatcactcgcctgttacagcaaggccttttaaagcctataaactcttcttaccattcccccattttacctgtcctaaaaccagacaaggcttacaggttagttcagaatctgcgccttatcaaccaaattgttttgcctagccaccccatggtgctaaacccatatactctcctatcctcaatacctccctctacaatccattattctgttctggatctcaaacatgctttctttactattcctttgcacccttcatcccagcctctctttgttttcacttagactaaccctgacacccattaggctcagcaaatcacctgggctgtactgccgcaaggcttcacagacagcccgcattagttcaatcaagcccaaatttcatcctcatctcttacctatctcggcataattctcataaaaacacacatgctttccctgctgatcgtgaccgattaatctcccaaacctcaatcccttacaaaacaacaactcctttccttcctaggcatggttagttcggtcagaattcttacacaagagccgggaccgcaccctgtagcctttctgtccaaacaacttgaccttactgttttagcctagccctcctgtctgcatgcagcagctgccgctgctttaatacttttagaggccctaaaaatcacaaactatgctcaactcactctctacatttctcgtaacttccaaaaccgattttcttcctcatacctgacgcatatgctttctgttccccggctccttcagctgtactcgttctttgttaagtcccacaattaccattgttcctggcccggacgtcaatccggcctcccacattattcctgataccacacctgacccccatgactgtatctctctgatccacctgacattcaccccatttccccatattttctcctttcctgttcctcaccctgatcacgcttgatttattgatggcagttccaccaggcctaatcgccacacaccagcaaaggcaggctatgctatggtacaagccactagcccgcctcttagaacctctcatttcctttccatcgtggaaatgtatcctcaaggaaataacttctcagtgttccatctgctattctactactcctcagggattattcaggccccctcccttccctacacatcaagctcagagatttgcccccacccaggactggcaaattagctttactcaacatgccccgagtcagataactaaaatacctcttggtctaggtagacactttcactggataggtagaggcctttcccacagggtctaagaaggccaacacagtcatttcttcccttctgtcagacacaattactcggtttggccttcccacctctatacagtccgatagcagaccggcctttattagtcaaatcagccaagcagtttttcaggctcttagtattcaatgaaacctttatatcccttacagtcctcagtcttcaggaaaagtagaatggactaattgtcttttaaaacctcagccaccaacttaaaaagggctagaaaaacttttacctctttcttttctcagaagtcaggcctgtcctcagaatgctacaaggtacagcccatttgagctcctgtatagaggctcctttttattaagccccagtctcattccagacaccagaccaacttagactgtgccccaaaaaacttgtcatccctactatcttctctctagtcatactcctattcactgttctcaactactcatacatgtcctgctcttgtttacactgccagtttacactgtttctccaagccatcacagctgatatctcctggtggtatccccaaactgccattcttgaagtaaataaataatctttgctggcaggactacgctgaatctccttaggcactctaattagatgtcctaggtcttcccaattcttagacctttaatacctgtttttctccttctcttattccatttagtttctcagttcatacaaaaccatatccaggcaatcatcaataattctaaatgacaaatgtttcctctaacagtcccacaatatcaccccttaccacaaaatcttccttcagcttaatctctcccactctaggttcccacgccgcccctaatcccactcgaagcagccctgagaaacatcgcccattatctctccataccatcccccaaaatttttgccatcccaacactttaccactatttcattttatttttcttattaatataagaagacaggaatgtcaggcctctgagcccaagctaagccatcatatcccctgtgacctgcacatgcacatccagatggccggttcctgccttaactgatgacattccactacaaaagaaatgaaaatggcctgttcctgccttaactgatggcattatcttgtgaaattctttctcctggctcatcctggcttaaaagctcccctactgagcaccttgtgacccctactcctgcctgccagagaacaacccccctttttcctttacctacccaaatccgataaaacgtccccaccccatctcccttctctgactgtctttttggactcagcccgccggcacccaggtgattaaaagctttattgctcacacaaagcctgtttggtggtctcttcacacggacgcgcatgaaagataccatctgtgtaaagtcagcacttccatctgaggccactctctagttcccataatgctaataggaaccatccccaaagccaaatatcacttactggatcagagttctcaggacagaatgtctctcttactaccattcagcttcctcccaaccattaccatcccagcacccttaatgtgctctctcccctgaagctgctccagttgctagaatggcatcattagtactgtatcactctttaagattcagtaaagcaacaggaagaggatgcatgactccctgaggtactctgtagtctcagcagaacagcactgtaggaaaattatattcctgttcttgatgcctcttcccatcccctcaacattcccattcctttccctacaccagcatttggttcacccaggacaccccatttagggtgcagccaatatagccataatagaaaaacttcattaaggagctcaactcataataacaaaaactcaaaatagtttttgttttaatcaatagctttccccttccccactgggttggagcctcttaacaccttgaccagattccatacattcctgtcattttctgttgcactggactggtcccattgggtatttaaaagccagggttactgacattaaaagttcaattgcaaacattattcaaaacctgttgcactcattaaccctgtgacttgtggaaatgagatctacttttcatacacctcccttttctttctgtcttcaaatcctttccctctcttcagttcactctagaatcccagtaattctcaaccttgactgcacacactggattacctaggagtttaaaaactaccaataccaaagtccactcccagagattctgattaaattgtcctggaggagtccttgacatcaggactttttaaagctcctggggtgattctaacatgaagccgagtctgagagacatgactgcagactctcacagacactcactgcggatagaacagggaggaatggagatgctgcctaactggctgtttcttggcagtgaggacggaacctaggctgattccctctggtcccttctgatgctgctggctctgctggtctgagggttgcatataggtatacgggtttcttctgaagtgtgaaggtagggggtcagctgtatcatagcccagtccccccctgctgatcccttctaacagtgggatgggcatccaactatttgactcttactctcaccaccatcctcttccacgtgaatcaattctttttgcagggaattggggtggcatgaggtgtccccaacttctttgcaggcacactaataataaatagcatcacttattcagcatctactctatgccaagaattatactggttgctttctttttttctttctttcttttttagatggaatctcacactgtcgcccgagctggagtgcagtggcgcgatctcagctcactgcaatctccgcctcccgggttcaagtgattctcctgcctcagcctcccaagtagcggcgattacaggcatgtgccaccatgcccagctaattttttgtatttttagtagagacagggtttcaccatgttggccaggctggtctcaatctcctgaccttgtgatcagcctgccttggcctcccaaagtgctgggattacaggcatgagccaccgcacccagcctgatttcttatttaattatcacacaagcctgccaagaggtatcaatccatatttcgtaaatgagggaactatcagagaagttttgttgcttacccagcattacacagtaagaaagtaatagagccaggtgagaaattcagatttgacttcaaaacgacagcctcttcattgttctattttacctgaagtcattccttttataatggtacctgtttaacatgttcccccgcttagataatgcagctgccttctactgaggagttttagtgccatgatccatcagtccactgactgatgatggagatttccagctgagacaggcaggcagatggaggaaaattacccctagccccaccccctacaccaacataggcactgcttatattcaaagacgtactttagatctgctatctactagaaaaatccagatttgtgcagatcacagttccacccactcatcagcatttctcagctttctgcccccaggacccactaatcatttacagcttgttgatggttatttgaacccagggtcaaggtgaacaccctcagttacacaacaaaaatgtatcaaggttttgtttaatcaattgcgtgtgtttcagaaagtctgtataaaattctctgcagtggcagatcatagcaagggatggtttaacaaaatgaaggcactcattgcagcactgcttttgatcacattgcagtattcgtgtgccgtgagtcccactgactgcagtgctgttgagccggaggctgagaaagctctagacctgatcaataaaaggcgacgggatggctaccttttccaattgctgcggattgctgatgcccacttggacagagtggtgaggaattgccaatggcagagctgagttgggagattactcacgggggcaaatgtgactctaccccctaggcttactgctttgcacaatgaatggctttggtcagagttttttgtttggcttctgcggctgctctaaattgttcttttttccttcaaactaatatttgttattagtgtacccgcaactatgattcgatttgtgggtacatataagcatttatgctgagcccagttacatgctaaggactgccagagaaacattagaataagctatgggccttggcctccaggaaataataatacactggcacatacaggcaaacagtgtaagttactaggataaactagagagaaggaaaagttttctcaaccctcctaaggctcctaactgagcctgaaataaaactggtagacaaggccaggcgcggtggctcacgcctgtaatcccagcactttgggaggccaaggcggacggatcatgaggtcaggagttcaagaccagcctggccaacatggtgaaaccctgtctctactaaaaatacaaaaactagctgggcatggtggtgcacgcctgtaatcccagctactcagggggttgaggcagaagaatcgcttgaactcgggaggcagaggttgcagtgagtcgagatcatgccactgcactccagcctgggcaacaaagctagactccatctcaaaaaaaaaaaagaagaagaagaaaacatacaaatttatttaatccaaggtttacctgacactggagtcttcataaatgaagactcagatatccaaagaaactggccacttgcatacttagaattcacaaaggctgtgcagaatgcagaagtgtgatgggacaaaaggctgtaatctaagagtcatagactgaaagaaggacccagcaaggcctctctgtttgagttcttcatggcctctctgtgtggcatttcttgctcccaagtatgggacaggatccctttggaatgcggatctgaggacctactatcaaacagagtaggtcagagaatgtctttatggccagctcctacaaagaaagacacagggggaaggttagattcatattttaggatttatggatgctttcggggagagggattctaccatctgtgactgtcctggagaagagaaattttagtttctatggcttgccttgggggagaaagcagagtaggagaacaaagggcagaaggtcagacagatctggcttctgaggcccttcccattttcttcagttcaaaggactcagcacgccaaaagtaccatactttgagataccatgttctgagccccaacaatagccaagtgaccaaaggagtggtaaatgtactggagcaatttaatgaggggagatctagtaagactggatgggaggaggcttctgctgtgtaatgatgcatgggtaggatttgaacaggtctgggtaaatgtgttcctggtgaattcctggcaccaccacttctaggtgggtatggaatcaggaagaagggtgttagggagccattgaatataagcaggtgggttccagaagttccatgtgggctctggagcaggcatcaggtaggagccaagcctgtgggcttgtcttgaggtgaaacaagcttactgtcttcgcttagattacacgcctacctaaactggactagaggagccgatagacattatagagagacatgaagcctgcctctaagctccccaaataacctactctccctctgatggaaaaactgaaattagggaggccagacaaggagtactacagaggacaatttacccttctgaaagtatcacagagggaggcactgtgggttgcagagaacaggtgtgcaggagtttaggattcaaccagtaattcagtgaccattagtcccatgccaggctcatcaacacatgttagggcataggatgcatcagcacagagctgcctctgagagctagcatagagagcgggtggatggggaggggtcctgatgtgcctggggaaactgaggcaagagacagggacatgaagtagaaagctatttatgtattcaggaatgaaagaacaagggtcagacctgggttagtgggagtcagggcaatgagactgaggaatagacatgagagacgttgccaagaaagaccattcagggcctggtactggatagcaaaagcaaggacaaggaaaacatctcgtaggtttacatgttttaccccagagtctaaggcaatatgttgttagtggtgccactgacaaagacgagggaagtggagagggcagctagtttgtaagagaagagagaggatttagctttgggcaaagcaacatcaaagcagaaaatcccatgatcagtaatagagctgggcaagaggacacaactacaaggacagattggaggccctgatgaggtcgtcatgacttatacttccaggcatgcgtaggtgatgatgcctccgctaaaccaccactgccgtttagtgatagcttcttcaagtttatgggcagaagacaaatcaggaccacttaaaaagatttggaaataactcattgaagctatgtattggaatcaatagatcaaatgacgcaaaggtagagcatctgcaaagacagtgagaggaacaggaattctgtttaagtaataaatatatagctttaatacataaaaaaaaacccgctaggtttccatgtgctactcacatgttgcttttggcattcctcaggaaaatacaactgtatattacttagtcttagatgtgcaagaatcggactgttcggtcctatccaggaaatactggaatgactgtgagccacctgattccagacgtccatctgaaatagtaagtaaagagggcaccttcactctgctcttttcattcttattttccatctactctgttcactcagccaatgcctgggctaacacagtagaagagaaagggcagcttttgccttgagattcatgaagatgatgttaaccttgagcaatactcttgagagtctttcctgggaacccagttcaagacaactcagcagggtgtgtggtcccatcaaagagcataaccagctgtgggtccttgggtaaatcatctaataacatccctccactttggtgttttttgactgtaaaataagaagtgggtttaggaattcatggactctaagggccttccactcttgacagtctacaggtatcagaatctatgaacttgtaattgtgtcctatgaacaatggtcctattttcaggaatggccaaagtaattacttgcagtgaggaattgggtcttgctcagcacctaggatatacactgaggaataagatctggctttgcatgtgggaggtgggtattgacatgccaggctctctgacacaggtggagaacatgaagatgaataagcagagattcaagatttcatttccagaaaatgagaggttcacactcctggaactttcaccactttttcccttgaaaatgtttggggtatggccatgatgctttaaatagtttctcgctggttctcctgaggattttgagtgccaacaggatgcagcacacagaaactgactaagaaaatgcagggtttgagacaagctttgatgaaagaaatgcatttttaaatgaacagtaggaggatgttgcatcacctttttgctctttcatatctgacctgaggaaggcaggatgcaatgactcagcaagtcctcaagagcctctttcttacaggtgatcggacaatgtaaggtaatagctacaagacattcccatgaatctcaggacctcagagtgattgactttaactgcaccacaagttctggtatggtaatctgttaaattgctaattaattcttgattaatacaaattcaatcatacagtggtatttgtctcatctatgtacatatgtattcatatatattcagatgtattcatgtatatctatgatgtacatgaaagaaaagccttcatagactccattattattcattctccagagaatagaattgagacaaatttccctggtactggtacaccttcttttaaagaaattcaacacataaaaatagagatttaggagaggtaggttagcctcattatagatataggctttggagtcaggcttgctttagcttgagtcatcatctgccagttgtatagtcttgggaggaagtaaagtcttgggactatgaagtaaaggttatgacactttctatttaagacaaaataattgatgctcaaagaagttaaatgacttggcctcaagaacaaagccaagatattgtgaagatgtgacacaatcccaggagtattaactctaaattccacagcttttttatttatttatttttatttttgagacagagtgtcgctcttgctacccaggctggagtgcaatagtgtgatctcgggtcactgcaacctccacctcccgggttcaagcaattctcctgtctcagcctcccaagtagctaggattacaggcatatgccaccacatccaacaaattttgtatttttagtagagatggagtttctccatgttggtcaggctggcctcaaactcttgacctcaggtgatctgcccaccttgacctcccaaagtgctgggattacaggtgtgagccaccacgcccagcctccatacccttttaatttacattttcaaatagaattatcacaggattcctttttaaaatagcaaatccaaatatgatattatatacaaaaatgcaagatactgccacaggagtttgcattgaagaaaggatgatctgtatcttctcctctctctgggcaaaactctatgttaatgctctgtcttcccccttggcaacaacaggaagaacttattaaaatattagtggcctggtgcggtggctcacatctataatcccagcactttgggaggttgaggccagagggttgcttgagcccaggagtttgagactagcctgggcaatgtgactcaaccccatctctattatttaatatatatgttaatatatatatcatattaatacctaaatatatgattatataatataaaaacatatgatatattatataatatataaatatataatagatattatataatagataatatatatttatatattaacgaatgtcatagttgtcatatttatatatatatgttagcactttatcagtggtactggtgaaggcatcatgagtaggggtcacaacatagacatggggatcagaaagactcgaaggaagaatcagcagtttagttcggttgccaaatggctgattgatcttgaagcagttactcagctcttcccaccctcaatttgcccatccttaaaatgaaagttattgtcattcttgccaccaagccaccattaacatttccagccctttactgtgacactgctatcttctttctccagtctcttcagcactggccaataccaaagatagtccggtcctcatagatttctttgaggatactgagcgctacagaaaacaagccaacaaagcccttgagaagtacaaagaggagaatgatgactttgcctctttcagagtggaccgaatcgagagagttgcaagagtggtgagtctccactaaggttcggttggagtctgaaggcccaggctccaacctggcagcaggaactgaatggcataccctctccacctgcctcaattgactagctgccttttaatttgtcacttttgaggccataaaagacaggcagcaggtatttaaaaaatacaaaaaaattgctttcctcaaacacttttttttttttttgaaggatgggtaggggagtagacatctgacagagtagggagaaaatctaaagaggaaacagggaaagacaagaacatatgagggttgtgtcattgcaaatcatccaatactaacattcttgtactatgatggaaaactgaagttcagagaaattacctcaccacacccagtaatgtgcctatagttagatggttccctgctctctctacaaggacccaagtactttcacccagagctgtcttgtagagcaactggttgacatttgctatgcattcagaaaatgcagcgttaaatagattgtgttgcatacaagtaaggaaatgagtaccatgcagttgctcaaagaatgtttggacccatgcgcactggagtttgaaaacatattggtataggaaaatgcaggttatagaacagtacttagactatggacccatttatatgaaacacttagatctccctgtgtatgtgtaacacatctaggaaaacactcgaagaggaaacacatcaaataaatgagaatgaaaactctgggaagaagttggagtgcaggagaggtgatttttcacactctactttatcatatatttattatttgaaccttttcagtgaactggtattcaccttatcacttaggtgatacatttttaaaaggcagaaaccattttaaaaaatgacacatactggtgattttgaattctcatactgccttaaaaaatattgaatggtagttatctactgcttttttttcctttttctttgtctgttcttgaaactattttgatcccatctgttctagagaggaggggaaggaactggttacttcgtggacttctctgtgcggaactgccccagacaccatttccccagacaccccaatgtgagtataagaaatgtctgtgatcgttgactagagtcacagagaaaaaagaaagagaagaaggagaaggagaaggagaaggagaggaaggagaagaaggagaagaggaatgagaaggagaaaatgaggaggaggagaaggaggaagaaatgtctgtgaaatacaaagtatcatctgggaagcacttagtacctgccaggcactcttctaagtgatttacacatcagataacttattgttttgttttgtttttgagatggagtttcgctcttgttgcccaggttggagtgcaatggcacagtgtcggctcactgcaacctccgcctcccgggttcaggcgattctcctgcctcagcctccggagtaactgggattacaggcatgcaccaccacgcccagctaatttttgtatttttagtagagatggggtttcaccatgttgatcaggttggtctcaaactccttatctcaggtgtccacccacttcggctgggattacaaatcaaagtgctggggttacaggcgcaagccaccatgcccagcctatgataacttattaaccctcacactaccatatgagatagataccatttttaatcccaaattagcagataggggaactgaggcacagagaacataagcgaaccataagaacatgattttataatatacatgatatatacctaaacttaaaactaagtttctaactgattaggattaaaggcttagttagaactatagcagttcgtactaagaccctacgccaagtggttttattaattccacatcatcacactcacaggaatcccacttgacaaatgaggaggtaactgaaaatcagcaaaggaaaggtcttgccgatgttcacaaccaagctgagattaaaacttagttattctcatacaaagtccagtgggatttttcctctaatcatttacaaatagattcccatgtacctgccagaagacattattaataccacctggcatttgcatggtgacctacagttaaagaaacacctccacatctgttattgccaggagagcctcatgaaaatcctgctgacaaggaaaagcaagtatctgcctacatttcctgtgacaaggggacctgaaattaaaaccacttacctaaaggcacttagctagagagtgttaggaaatggaattttaattatgatgccaagtccaggatttttctgaggtttaacaacacattctccctggtcaaaagggagaaaccatccattagtacctttgttagctcttctaatgtccacactgaaccaggtctagaaaccttcttagcgcccaccagaaaagacacctccctcccctactcctatggccaacaaacccttcatgatcttggtgtggataatgtaaacccagagttgaagcaccagagctgaagaggaggctcaggggtaagtgttttacagcatcctcttgtttaattaatccctcccacaacctgtgagtacatagtattatccccattttacaatggctgactttcagaaatcttttgtaactttcccaaactcagacaactaggaaatggagaagccaggattaacataggtctctctgattcccaaactgtactcagaacctcaatgcttagcaatttcttctagcagacagccgtcctcttgtcctagtcgatctttcacaggtgggtttaggagcatctggagcacaggagtggcagccagttgtagccctggcacttgggtggagtcagcagacacttgccttgacaatgtccatgaaaacccatctttatgctatacagatgccctcctgtccaacactttcctccaagggaccagctgaagttgtaaaaatccctctttgacaccattcctcattgtcctaggcacaggcaactgaggtctccagtgcagaagggttggcctaaaggcaaggcagcaatgatgtggttttcctcatcatttccatcacccatggggaagcccagtgctggtgcctgctcatgaaaaaaaccacagcaactttagtgatacccttcaccacctgcactttccccaaagtgttaacaaggaaagattgctgaacgactggtgggaatatctgatcatattaccctgatttttctaaagcacttcttccttttctgaatgtctggaagctaactctggctggtcatcttcacaccacctggacacacacactaacagctcctcattcctttgtaggtctttggattctgcagagcagatttgttctatgatgtagaagccttggacttggaaagcccgaaaaaccttgtcataaactgtgaagtcttcgaccctcaggtgggttgtctaagcagactttgtcatggcagtgccagattaagtgacatacgtacacaaatagtgttgttgcttcctaaagctctatgagtgggtgtgtgtgtgtgtgtgtgtgtgtgagagagagagagagagagagagacagagacagagacagagagagggagacagggagagagagaaagagagagacagacagacatgcaagaaaaaagatacagagagtatcccacaactggggaaaggagtgcaattgccagattacacaaaaagtatgaaaacttttccaagaattgaagaggggtaacaattggcagaaaattaaaatcatgtccaattcaaccaaacttgaaggaatttgaaaatgctctttgtagtcgggactctagtgctgagacttagtcattcctaagcttatattattgggcatagaatctaagaggaatatatcagcctcaaatttattatgtaaatgtatataaaataagatgcaaaaccatattttgcatctgtctcagaaatctttggtctattttttacatgagtacaaagatttgcttcacgaaatttttcatatcagaaacaaaacttaaaataatccaaacatccaatcccaagttaaaaaaaagaaaaaggaacaaagggcaggattgtcaccatgaacatggctctgtctttttttttttttttttttttgagaaggagttttgctcttattgcccaggctggaatacaatggtgccatctcggctcaccacaacctctgcctcctgggttcaagcgattctcctgcctcagcctcctgagtagctaggattacaggcatgcgccaccatacctggctaattttgcatttttagtagagaaggggtttctccatgttggtcaggttggtctcaaactcctgaccttaggtgatccacctgcctcagcctcccaaagttctgggattacagacatgagccaccgtgcccggcctctgtagctattttttaaaaaattaaactctgaacaaggaagagagagaagaggtcaagtgttcagcctttaggagtaagggatgttgataccatcaagcctcagttaagaatatcagttataaggcactagttttccagtgttggtctacagatgggtgccaggtcataatattgtttcaccactctgtgtagtaaaaatgaaaaaaaaataaggataatgaagttttttatatctaacatttatccatctaaaggacaatcctttactctgatattgtgtttctggctctttcttttttttttaaatcaaaatttcattccaggctgggcatggtggctcatgcctgtaatcccagcactttgggaagctgagatgggtggattacttgaaacaaggagttcaacatggtgaaacctgtctctactaaaaatacaaaaattaggagtctgggcaacagagtaagactatgtctcaaaaaaagaaaaaaaaaaattaggtgggcatggtggcttgggcgtgtagtcccagctacttgggaggctgaggcaggagaattgcttgaacctgagaggtggatgttgcaatgagcagagatcgcaccactgcactccagactgggtgacagagcgagactcagtctcagaaaaaaaaaatagtttcttttgtgaaacaatgatggtggtaaatgatagttattgttaatattttaaatatcaactgggctagataacaatttgagaatcttttttcgtaatactttttaaattgatttgtggaatctatgatctgggagccattggtgtaaatcaagtcaagtatctaacatcttcttttatgttacatgatgataggcacttttctgtgaccttttccaggaacatgagaacatcaatggtgtaccgcctcatttgggacatcccttccactggggtgggcatgagcgttcttctaccaccaagcctccattcaagccccatggatctagagatcatcatcatccccacaagccacacgaacatggacccccacctcctccagatgaaagagatcactcacatggacccccacttccacaaggccctcctccactattgcccatgtcctgctcaagttgtcaacatgccacttttggcacaaatggggcccaaagacattctcataataataattccagtgacctccatccccataagcatcattcccatgaacagcatccccacggacaccatccccatgcacaccatcctcatgaacatgatacccatagacagcatccccatggacaccacccccatggacaccatcctcatggacaccacccccatggacaccatccccatggacaccatccccactgccatgatttccaagactatggaccttgtgacccaccaccccataaccaaggtcactgttgccatggccacggcccaccacctgggcacttaagaaggcgaggcccaggtaaaggaccccgtcccttccattgcagacaaattggatctgtgtaccgactccctcctctaagaaaaggtgaggtgctgccacttcctgaggccaattttcccagcttcccattgccgcaccacaaacatcctctaaagccagacaatcagccctttcctcaatcagtctctgaatcatgtccagggaagttcaagagtgggtttccacaagtttccatgttttttacacatacatttccaaaataaaatgtgattcctttgaagaggaaaatgaataatacattgaattagaaacataaataaaatgaccagtaattgtgaaaattacagttcttttcaacctactttcatactgaagatgcagcaaaatgtgaatgggaaaagagatggcctgagaagagagatcaaatggaaaggagaggaaagaactcagtgctgcctattagtagttaattctgtcactcaccactacatcacttgagacaaatctatgccactcagaatctccttctttcctggacttaactctaattctagagtctctgttactgcttgggctatacctgggcatactaataaagtatggtattgaaactattgttatcatttatttcattttattttctaagttccagggcacatgtgcagggtgtgcaggtttgttatataggtaaaagcatgccatggtgctttgctgcacctatcaacccatcacctaggtattaagcccagcatgctctagttctttttccgaatgctctcctgcttcccaccctccccctatttattattattaaagtgacctaaattctctcctcgtgattattactaggcatctaaattttcttttggaaaaataagttctaaattcagtattgaagcaaacaaacctctggctataaattgcaaagaagcttgctaacatgaatcatgaccataaattcaggtgcataagaaatgtcactttatgctcagaacaaattaatttctatttgaggatgccatcctactggcttagtggaaatttaaccccagtccttcttggagtcccctttccctgccctgctactttccacacaaagttgggccacagttctaggatctcacaccatgccaagctgtccaggtggtaggaagcaggatagtgactatccctcagccagggtgactgttggaccaatgatcatcatcatgagtgatagc

SEQ ID NO: 21 - DNA, 2433 bp, Homo sapiens
ccgaattaattgctcccacccgggagggatctgggtaggccctccgggtctcaggaacacgaacagcaacattatttaggaattgagaaagcccaggggagcagatgtaaaggagcgcccgctttaaatttcggtcctgatatttgtagatcagggtccgagaagcatcttccaagagggtccggaaacccaggctctctgggctatccagagccagccgcttctccgttcgggcctcaatttctctcatctgtgaaatggagctggagaagtgagaaagtgaatatgggaaaaactgattcctgaggtcttttcattataaggcaatgcctgcttagcttccttgcctccttccagaggagcccagtgcggccctcgcctctacccgctgccctgcccggtgccctgccaccgacccacccttgctgttctgaaacccgggtcgtctttccacactgcgagcaggcactagacgagcaggaggctggacctaggagcgcgggtcacgcccccatgccgcccattggctgcttttgaacgttctgagcccgcccctccgggggccgtggcgtgtttataaaagacaagctgtggctccgcactctcattccacgttcttaactgttccattttccgtatctgcttcgggcttccacctcatttttttcgctttgcccattctgtttcagccagtcgccaagaatcatgaaagtcgccagtggcagcaccgccaccgccgccgcgggccccagctgcgcgctgaaggccggcaagacagcgagcggtgcgggcgaggtggtgcgctgtctgtctgagcagagcgtggccatctcgcgctgcgccgggggcgccggggcgcgcctgcctgccctgctggacgagcagcaggtaaacgtgctgctctacgacatgaacggctgttactcacgcctcaaggagctggtgcccaccctgccccagaaccgcaaggtgagcaaggtggagattctccagcacgtcatcgactacatcagggaccttcagttggagctgaactcggaatccgaagttggaacccccgggggccgagggctgccggtccgggctccgctcagcaccctcaacggcgagatcagcgccctgacggccgaggtgagatccagatccgaccactagatcatccttataccgacggggaaacggaggccagagagggcgtgggcgcttgcaccacttccgtcccatccttgcgggtacctggctatgcgggggtgcctaaggagcctggaaaaagcgctcccccgtcgtgcttcctggggaagggggcgttcgctgcgctcggagcggcgtcccttccaacccgccggtctcatttcttctcgttttcacaggcggcatgcgttcctgcggacgatcgcatcttgtgtcgctgaagcgcctcccccagggaccggcggaccccagccatccagggggcaagaggaattacgtgctctgtgggtctcccccaacgcgcctcgccggatctgagggagaacaagaccgatcggcggccactgcgcccttaactgcatccagcctggggctgaggctgaggcactggcgaggagagggcgctcctctctgcacacctactagtcaccagagactttagggggtgggattccactcgtgtgtttctattttttgaaaagcagacattttaaaaaatggtcacgtttggtgcttctcagatttctgaggaaattgctttgtattgtatattacaatgatcaccgactgaaaatattgttttacaatagttctgtggggctgtttttttgttattaaacaaataatttagatggtggtaaagttgtagtgacttcttgggttgaggggaggggcctgggctgggggttgacccctgaccctcttcacagctggttctgggaggagaattggagggctacatctggattgttgctcttaccggcctgaatgagtgtttccggtgtctttaaagtctattcttcccccaccatccctgcccatttccctgctccccagtgttataaaactaaatactccagacctctggggtttctcacagtgatcattgggccatctagatcacctggggaggttgttaaaatgcagatgaacctgccagggccccctctgtattgggagtattgagcaagccatttaagttggagaacctggccgctggaccacccacttccttgccaagatgtggataaagtgagacccagtggaaagggacttgcttagggccatagcttgtgagaggcagtgattctatcaccccattccccagttggaggtgcctcccccaacagcctacctctgggttccagcaggcagccctggggctcctggctcatccaagtgggtgagcaagttggcagggccaggctgggcacagctgccgagacacctgctctgggtcca

SEQ ID NO: 22 - DNA, 6809 bp, Homo sapiens
gcacatcctcccggctcccccagggcggagaggggggccgttctggaagaaaaaattgtttatgcgcaacctccgagggttccgaggagttaggcagtaagacggtgtggaggttgggggggcggggcgagtctttcaatctttcaaaggtatttttaggaatccaggatcaaagccattcggcgagaaaccgaaataatccaaaggagtaaataaatctcgccatgtgctaagacagtgaccttctccccatccacccttccctcgcgccagccccaccctgaacgcctcggttgcaaaaacaaaataaagcaaaaccttttgctttggcaacctctaagccacattatgcctccttttgcaaaaggaagatttctttcttctccctctcccggcttttttccttcgtcctctcctccgcccctcacccgcccacccccccccccccccgagcccttttcttttcttctcggtcctctttccttccccaaatcactcgaaacttaagacgtgcagcgtctgcaggtgcgcgcgggccggcggccgggcctgggcgagcctgggactgccgggcctcgcaggcattgatcagctgggcgcgcgcgctgagtgacggcgcggttgccatggcagccgcctgagcggcgccgcgaggacaaggctgcagggcggcgtgaatgggcggcgtcacgcgcctggcgccagagagtctgctccggggctccggctccggccccgccgcggcctggcccgcgcgccgccgccgccgccaccgccgccgccaattcatcacctgtcagggatcactcgcggggtcacgggcggaatggacacagctgtgagaacaaaacccgggaaagaaaggcgaacgctccccattgcgccagatgtgcagggaggaccttgagacgcgccccccgcccccgcaggctcctcccgccccccggcgcatcacgcgggggtggcaaaggcggcctggccagcgcggagctcccggcccggagctgcttctgattaccgcgaggggcccggacgcgagagccgccgcggggcctgccctagaggcggagtgagtgagtcctggagccaggctgggggaccttacgggccggtctgtcgctgccacggggtgggggcgtcccggtggggagtcgaggggaaccgcaccaacacccaccagcggaagccctgcacaccttcccaccgcccgcggatctagccctccctctagctggggccgtttgaactttggaggcctcaaatgcaaacccacccaagccaccaattgacagattttgacttgcctttaaacccacttggaaaatgctccgacacgattttcccccacgaaagcaatttttaaggtgatttcatattgggcgtgctgaaacagacacactagtaacttaggcctcgtttaaatcattaacttatacagcttcgtaatcccctttaaatgatctttaaatgaatgtaaaactgggtagcgtgccaatagaatcgaattcaacacagccaggcagactggactctgacatggcagctaaagaaagaaacaccagaaaactttcaccatatttagccattttactacatcagggtacaaaaatgatcatgggagaaggcactgccttaatcaactttgcaaagtgtaaagtgaaaccgcacaatgctcattaccgcccaacccagagcctggctgtggggataatgaggctggcacggatgttaacatacggtgtccttggaaaaagctaggaatgcgtcagtatcgaagagctgcaatgtccaagaatcataagtaataatttgagaatcccaaagatgtttgtttacattggctattattgtaaaatagtcaaagtataacatcatgaaccaaaatagtgtcaaaacaaaatctgttccactgtggcacgtatgtgacagaaacacatgcacacaaagtacatcaaaaggctcgaactgtgggaggactcggatagtaaatcacttccagacttaatatcagaagagatacggtgcatccaacgctgtcagggacagagtcgcaggcagcattgcctggcctggggaaggccctccgcaaacttctggctggacaggaaacagtttacctccttcctccaaactgagggggctgaatttcaggaaggtgagctccacctcagtgccacccactctgcctccctggagaggcgtcatggggcgcatagctgtcacgtgacggtcagagactgctggccccaccagctgagaaattaatcattaattgaaggaaaaaacactgtttccccattatcgagcttttctttcagcttctaggcctgccccttccgctttctgaaatgcaaaggaggtagagattgaggcagaaagtaaataagatttgaatattgcctttcctggagttttctagttcattgttttctggagcaaatattttcaaaaacaagaaactgacacactgtggtcaaaacagaattctagataagctacaattatgtgaaaattaaggtatttaagtaaatagctgcaaactttttaaaacttagactgaaagaacgagttcttaaaagattttcagccaaaaaaaaaaaaaaaaaccttgaacccgtattcagtactagtgctgaaaagattccaaacctcatatgacagaatatttttttttccttagtgtgaagatgtctatcaatggctagggccacctatctgtcacaaagctttggaactcctctaggtgttggaatgtgacaccagaaatcacaattagtgcataattaatcacattactttgccacctacacggaagggcacagaccggcagcctttcaagggcagtgtatgtaaatgtagtttcaatatgcaaattctcctaattatttccgattaatacgatcattataatagccctgcctccttcttgaaaaggaaccctgaaagcgccctgcctgtgagagctccttagcgaccggtgaggttgggcatggtttgcaataagtactcattttcttgagtttacagtaatgcctcccgcgctgctccgggttgcaaaagcccacactaagcctgtcgtcgaatgcgtgcgtgggtggtttgtttgtgttaacataacttttccttatctgaagagacgaactcactctacaaacgtgactcttcagtgacaacctaatttgcgttttcactttcttctgaaatgctttctatctttcctcacgctctccctccgatgggttgcagtgaactgtggcttcccccctgcggtgctgaactcgcccgtgtagctgtgattttagagctgccgacagctctaaggtgtgtagggcttggtctgggaacacccccagggcaagggtcccgccgcgcgcttggaattagaattaagaatgcatatttaggcgcccagggtctgcccccttctccctcctccttcccctcccccttcccctcccccttcccctcccccatcttcccttctcttcctcctccctcctcctctccctcctcccgcctccctcctccccgccccccgcccgccgctccccgccccccgccccccgccagccccgcacttactgtactgtactctatttaccaccccagctgggctcgcgccccgcccaccccgcggggattggctgcgaacgcggaagaaccaagcccacgccccgcgcccgcgcccaccaatggaagcgcccgctcgtcttgatagacgtgccaccttccgccaatggggacgaagggaagctccagcgtgtggccccggcgagtgcggataaaagccgccccgccgggctcgggcttcattctgagccgagcccggtgccaagcgcagctagctcagcaggcggcagcggcggcctgagcttcagggcagccagctccctcccggtctcgccttccctcgcggtcagcatgaaagccttcagtcccgtgaggtccgttaggaaaaacagcctgtcggaccacagcctgggcatctcccggagcaaaacccctgtggacgacccgatgagcctgctatacaacatgaacgactgctactccaagctcaaggagctggtgcccagcatcccccagaacaagaaggtgagcaagatggaaatcctgcagcacgtcatcgactacatcttggacctgcagatcgccctggactcgcatcccactattgtcagcctgcatcaccagagacccgggcagaaccaggcgtccaggacgccgctgaccaccctcaacacggatatcagcatcctgtccttgcaggtaagacctgctccggggtccccgccccgccgccgcacactcccgcggtcgtctgggctgtcactaggagatccgtagcccagacggtgactttcgtatgagctatttaactttattttcttcagaatctgctgtagattgagctgtgcgtgaaattgctagtaagttctgacatgttaatgcgtctgtctttaaatctgaattgttaccataaacgtgtttaatggaacttgctggtctgtggactacaaaaaaaaaaaaaaaaaaaaaaaaaccctttctacttaacattgtcttaacctcgtactctttatcctctttctttccaggcttctgaattcccttctgagttaatgtcaaatgacagcaaagcactgtgtggctgaataagcggtgagtgtttgcttgtgccacccgtgggtaaactgcccctcggtgtgtgtgcgcgcgcgcgcatgtgtttttgcttgtgtatctataaaatgtctgatttggtaaatgcatgcttacttcgcggtgttacccgtactacattgtctcactagacatgaaggagcttgtagctttgggtgctcgagatcacagaacattttcctttaaaaggaaatgatgccaataacttactacgaaggcggccgaggaacgtgtgtattggctttgtagcaaatgtaatgccctggatcttcctacgagtcctctggtactatgaggtactaacctccactgtaattaatcttaccgccacaaattccatagtgatcctccttccctaaaactatagtcctctgggattctctgggctagttgaggattgctaccctgtgccttcaaccctgtgatgtgggatcccagacttccctatctgttaactaaagggctgttttcaatcaaataattgttacgagaagcagactggcgcctgtagcactgctgttggagatccaaataggagattgggttgggaagtttttcccttgagtctctgctattttaatgtttaatttgcgctgtcgaggcgagtgtgtgtgttgcatctggacgccagggtttgcccaatctttgagtgtttggttaaatgttcaaactgtggcttcctcccggcgccagtcgcccgcctctgcccttaggttacattctcttaaacatgcctttctcccccactctttcgcaggtgttcatgatttcttttattctttgcacaacaacaacaacaacaaattcacggaatcttttaagtgctgaacttatttttcaaccatttcacaaggaggacaagttgaatggacctttttaaaaagaaaaaaaaaatggaaggaaaactaagaatgatcatcttcccagggtgttctcttacttggactgtgatattcgttatttatgaaaaagacttttaaatgccctttctgcagttggaaggttttctttatatactattcccaccatggggagcgaaaacgttaaaatcacaaggaattgcccaatctaagcagactttgccttttttcaaaggtggagcgtgaataccagaaggatccagtattcagtcacttaaatgaagtcttttggtcagaaattacctttttgacacaagcctactgaatgctgtgtatatatttatatataaatatatctatttgagtgaaaccttgtgaactctttaattagagttttcttgtatagtggcagagatgtctatttctgcattcaaaagtgtaatgatgtacttattcatgctaaactttttataaaagtttagttgtaaacttaacccttttatacaaaataaatcaagtgtgtttattgaatggtgattgcctgctttatttcagaggaccagtgctttgatttttattatgctatgttataactgaacccaaataaatacaagttcaaatttatgtagactgtataagattataataaaacatgtctgaagtcaatacctgaattccgagtggtttttaagatctctggcattcactagctcttttctctccctgtctccccctctcggcccccccccccacacacacacacacacattgttttctttatccccttctccttcatccccccaccagcagcacccctgaagcttttacttgtgtacagagaatcttatcagatgtgtggtaaggcagagggctgagttgacagggactggggaggctttgagcacagaagtgcctcgagtccttaagagaaagcttggttctgtgcctcagggctgagtttaaagccaagaatgagttgagtctgggagtgtggaagcactacctgtctgagtgggcgttaagacgcttctctggagtaaatgaaagttaatcaggagaagaaaagaggctgtacagaattcagaacatgatttcaggtttaagggaaggcagaaacacccgagggttactgtttgcacagggaactaagctgtcacctggccccgggctcctgaggcctccttggcttcgcctgcgtccacacctgtagcccccccgccacaccccacccacctccgggcctccggagacggggctgggccgggc

SEQ ID NO: 23 - DNA, 3077 bp, Homo sapiens
agaggggaagttaagaaatttgctgacccaattgggtgggggggggctcttaaaaaggtttatgtagaaattgtcccatctgtgcctccatatttaaaaccttgtccaaaattctaattgaactcacaaagcacaactgtgcatatatttagttcgttatggagtttatggggcagagggtccaggctccttttttccccatgcaaaaagcatgggctcaagctttcttcttttcccctgttgctcaaataaatagtgttctttgctcaaaccccctttccctcctccttctgcaatctcagcgcctagcgcaaatctgttttcttcattgtaacctcagcttcaccgcaattaattttttttccctctggtcacaagataattcctgacgccagtgagtctggaggtcagacgaacagcaaattggggaacaaggcggcactaattccttacaagtttcccttgaaaaatctttcgcttaaaaaaaacggggggtggggggagcttctttgctgttcagggatttatgacctcggaggagctgtggctcgaaccagtgttgggctaaaggcggactggcagggggcagggaagctcaaagatctggggtgctgccaggaaaaagcaaattctggaagttaatggttttgagtgatttttaaatccttgctggcggagaggcccgcctctccccggtatcagcgcttcctcattctttgaatccgcggctccgcggtcttcggcgtcagaccagccggaggaagcctgtttgcaatttaagcgggctgtgaacgcccagggccggcgggggcagggccgaggcgggccattttgaataaagaggcgtgccttccaggcaggctctataagtgaccgccgcggcgagcgtgcgcgcgttgcaggtcactgtagcgggacttcttttggttttctttctctttggggcacctctggactcactccccagcatgaaggcgctgagcccggtgcgcggctgctacgaggcggtgtgctgcctgtcggaacgcagtctggccatcgcccggggccgagggaagggcccggcagctgaggagccgctgagcttgctggacgacatgaaccactgctactcccgcctgcgggaactggtacccggagtcccgagaggcactcagcttagccaggtggaaatcctacagcgcgtcatcgactacattctcgacctgcaggtagtcctggccgagccagcccctggaccccctgatggcccccaccttcccatccaggtaagcctcgaagtcgggacagggctgaacacccaggcaaggatgctgcgggaccctcggagctcccgattgcctcgcgtaactcttccctcttttcctctaatcagacagccgagctcactccggaacttgtcatctccaacgacaaaaggagcttttgccactgactcggccgtgtcctgacacctccaggtgagtatctcctctcttggagagggaggtttaaacggcaagtcctggagttggcagacgttttgaaaaattgccactcactcggtttagggaaactgaggccagagagggacaagtgacttgcccatggttgcatcaaatgaatggcagagtcagtttccatgtgatgtgcatttaagccttaaatgcgcctgggccctgccctcccgcagtggccgagggtctggcaaagtagacatgggtccgactaaatacaagtctttctgttccatgttgtatagggagctgtcttcggcagccccctcccagctagtgtcaattccaagtaggaggggtagcgcaagctccgcctgtggtctttggcgccaactgggtgggggcagcgtggggcgcggagttatcagctggaggtacagaccaagtttcctccctggcgccggccagtctgcggacggcccccgcctcggcacgctcggcggaaactgactgctccttggtcttctttcctcccccgcccagaacgcaggtgctggcgcccgttctgcctgggaccccgggaacctctcctgccggaagccggacggcagggatgggccccaacttcgccctgcccacttgacttcaccaaatcccttcctggagactaaacctggtgctcaggagcgaaggactgtgaacttgtggcctgaagagccagagctagctctggccaccagctgggcgacgtcaccctgctcccaccccacccccaagttctaaggtctcttcagagcgtggaggtgtggaaggagtggctgctctccaaactatgccaaggcggcggcagagctggtcttctggtctccttggagaaaggttctgttgccctgatttatgaactctataatagagtatataggttttgtaccttttttacaggaaggtgactttctgtaacaatgcgatgtatattaaactttttataaaagttaacattttgcataataaacgatttttaaacacttgtgtatatgatgacacccgtctccattaagtactaatgatgctttctcgcacatggccgaattttgggagctttgggaaagtgaacttgcttattctacgagagggaaatgaaaaactgcctggttgagaggggatggggtggagagagaagggttcatgatgggagtctcatgtccattgagggatgggtgcagagaaaagttctgggctctgctcattatttcagagatgaaaccagagactggtgcaagcttgcccagcaagttggtggctcaggcaacttgaaagttggtggctcaggcaacttgaaaactgagttttcatgtcccttgagatctagcagtagctttcctctttattgttactattgactatgcctttctagcaggggatgtggtaagaggagagcctcaagtttgcttcacctggtgcccaggcatgggtggtggttgatagaccaattccaaaaatgaataaactgataactgggcctggtttcatttccttcttgctctctgggctggcttccttgcgggcttccaaagttggaaaaaagagggaggtctcctgaaatggataaagatttggatgctggttgggaagtactgatag

SEQ ID NO: 24 - DNA, 4499 bp, Homo sapiens
tgccttcttgaacagcgcgtctttcttaaggcactggaatcccacggatggagtgatgggtggcggagggtccctgggcgccgtgctattaggagtggcagggtatccgcgagcagggcccaggcgctccctcagcagcctagtcgggataaggggggcggtggagagtgaattccggccgcacattcccgcagttcttcgcaggaacttcgctctctcttttcccctcccttgggcacacatcagcctggcccgactcccactcagctctcttttctcagaaccccgacccacagcgttgacggaatggagtgcccttcccattggcccgagcgtcattccccgaggtggcactgcccgcctgattggctggccactccagaccccccgcccactcctccactcgggtagccggactccccgccccccagcaccgcccggagcccccgccctcgcctctccctccgcgcccccgcccgcgcgcccagcgggctccgctcggctcgcgctgcgacccggcccgcgcgctggtcccgcccccggggcgcacggctctataaatacagctgcgcggcgggccgggcgagagcgtagtggaggaggcgcggttgtgagtagtaccgggagtggggtgatcccgggctaggggagcgcggcggccgcgatcgggcttagtcggagctccgaagggagtgactaggacacccgggtgggctacttttcttccggtgcttttgctttttttttcctttgggctcgggctgagtgtcgcccactgagcaaagattccctcgtaaaacccagagcgaccctcccgtcaattgttgggctcgggagtgtcgcggtgccccgagcgcgccgggcgcggaggcaaagggagcggagccggccgcggacggggcccggagcttgcctgcctccctcgctcgccccagcgggttcgctcgcgtagagcgcagggcgcgcgcgatgaaggcggtgagcccggtgcgcccctcgggccgcaaggcgccgtcgggctgcggcggcggggagctggcgctgcgctgcctggccgagcacggccacagcctgggtggctccgcagccgcggcggcggcggcggcggcagcgcgctgtaaggcggccgaggcggcggccgacgagccggcgctgtgcctgcagtgcgatatgaacgactgctatagccgcctgcggaggctggtgcccaccatcccgcccaacaagaaagtcagcaaagtggagatcctgcagcacgttatcgactacatcctggacctgcagctggcgctggagacgcacccggccctgctgaggcagccaccaccgcccgcgccgccacaccacccggccgggacctgtccagccgcgccgccgcggaccccgctcactgcgctcaacaccgacccggtgagaggccgggcgccggccgtgggcggacgccgcgggggatgggaggttggtggcgtggtggcgggacgcgggcgctcaccgtcctccgggcaggggcgggccaggaatgacagccccctccccctgctcctccgggctcccccgggccgccagcagccggccgggctcggcgagcgcgggtccgggagaacgcgcagggcgggactcggggctgtgggcgccctgggctgtcaagtcccgcctgagcccggaggggcccccccggctacaggctggggtgggggcgtcggcgcgccagcctgatttccgaggacaatccaggaccgtgtcgagcgcgttgtttgcgcctgctaacctttcccttggtgttcggttgctgttccaggccggcgcggtgaacaagcagggcgacagcattctgtgccgctgagccgcgctgtccaggtgagcgcgcatttcccgtctcgggtggccggtcaccagagacgcccgtccccgagggcttccggggccaggcaccgcggtgttctttgcccccagcgtttctgagagcaaactcccaaggaagtaaatcccctctctccctgccacctaagtagcaagtaaacccgtacttagccttagaactcgaggttcagtctcggtggagacgggtcagcccttgtccccgccgtccccgtgttttttctggtggtcagcgggctcttctgccttccctagttcccgagggagggcaccctcgtgggcatgggagctgccccggtgtcctcccgtgcagtctgtcacccacaaagggggacgcgggcagggcgccggagtgggtcccctctccgggcttcccgagggccgcagctgcctgctcggcgcctggcccggccgcgggcgggtgttgtctgacctggtggtttgttttgggttgttgatcaagcatgtcttgagtttggtcggtggcgccagttagtctgcagcgagaaggttcacacaccccctctattcattcctcttccacaggtgtgcggccgcctgagcccgagccaggagcactagagagggagggggaagagcagaagttagagaaaaaaagccaccggaggaaaggaaaaaacatcggccaacctagaaacgttttcattcgtcattccaagagagagagaggaaagaaaaatacaactttcattctttctttgcacgttcataaacattctacatacgtattctcttttgtctcttcatttataactgctgtgaattgtacatttctgtgttttttggaggtgcagttaaacttttaagcttaagtgtgacaggactgataaatagaagatcaagagtagatccgactttagaagcctactttgtgaccaaggagctcaatttttgttttgaagctttactaatctaccagagcattgtagatattttttttttacatctattgtttaaaatagatgattataacggggcagagaactttcttttctctgcaagaatgttacatattgtatagataaatgagtgacatttcataccatgtatatatagagatgttctataagtgtgagaaagtatatgctttaatagatactgtaattataagatatttttaattaaatatttttttgtaaatattatgtgtgtgtttttttttaatctatgggaatatttcttttggaaaatcatttttcagctcaattacagagctcttgatatcttgaatgtcttttctgtttggcctggctcttaatttgcttttgttttgcccagtatagactcggaagtaacagttatagctagtggtcttgcatgattgcatgagatgtttaatcacaaattaaacttgttctgagtccattcaaatgtgtttttttaaatgtagattgaaatctttgtatttgaagcatacatgttgaaaatacaccttatcagtttttaagtacagggttttatagtgtaatatatacagagtaagtgtttgtttttgtttttcaactgaggtcaaaatggattctgaatgattttgcatatgggatgaggaaatgcttggatccttaaggagtttacgaaatctgctgttttatcaaagtgaaaaaaaattgcttattactcttcattttacactaaagcttaatgtcactaagtttcatgtctgtacagattatttaaatcatggaaatgaaaaaaatgttctctgcttgctaccaaaggacaaactcttggaaatgaacactttctgctttccttcctccaaagaattaataggcaacagtgggagaaaaaaaaggcataatggcaaatccttcaagcagggataaaagtcgatcttcaaacattaacttaagcagaccaaaaattctgatgaccgcatctagattatttttttataaaaatgattttcactatagctatgttacgctaagctactgtccaatctcttgtgatgtgtaacttttacatgtgaatattaaagtagatttctctgtcttgtactgtgatttctggtctcatttctttaaaaccttactcttatttttcttttaaggctcttttttctccttaaggaaggtaatattttctaggttagataggactatcagggtttgtgaacattatgcatttaatgttatgggtactttacacacaagttagatggaatttttagagtgaaagaattaagtaggatttaattgggtgctttgtaaatagtcaactgtgtgtataacgtggtctgtttgatttttaaaaggaaaggatttgtttcagattatacaagaataaaagtattatagacccaagggacttcttatgaggtcaaattcagatatttatatgaatatgaaataccatggtccctagtagtcagttgaagtggcaatgtctaaacagaaatgaacaaaactaatgctagcaggttaaaatcaatcaaaatgtttaaaaattgattctgtcctcagcatgttatttcctcagctctgataatttactggtcttgagtattttgagaatttgatgttgaacgttataaagtcaaagaactgcttgtttagatgaggtttatttttatttttgatattattcattcttgtcac

SEQ ID NO: 25 - DNA, 7319 bp, Homo sapiens
aaatacaggcaattaggtgctacctctgggaaaaggggccaggagaggaaggagacacttttccctgcatgccctgatgtcctatttgaacattttatcatgaacacgaacttcctatttaaaaaacactttttattgaaaagataaatctgtgtgttgtattgtgtcactcagttcaagtacttgaaatttattgaattgtattttctaaaaaatagatagttgagtaaaagcaagctcacattacatagacggatcacagtgcacggctgcggagctgggagcagtggcttcgtttcatgcaggaaagagaacttggttcaggagtgtctacgttgcttaagacaggagagcactaaaaatgaaaccatccagccatcctcccccattttcattttcacaccaaagaatcccaccgcggcagaggaccaccgtctctgtttagacaatcggtgaagaatggatgacctcactttccccaacaggcgggtcctgaaatgttatgcacgaaacaaaacttgagtaaatgcccaacagaggtcactgttttatcgatcttgaagagatctcttcttagcaaagcaaagaaaccgattgtgaaggtaacaccatgtttggtaaataagtgttttggtgttgtgcaagggtctggtttcagcctgaagccatctcagagctgtctgggtctctggagactggagggacaacctagtctagagcccatttgcatgagaccaaggatcctcctgcaagagacaccatcctgagggaagagggcttctgaaccagcttgacccaataagaaattcttgggtgccgacgcggaagcagattcagagcctagagccgtgcctgcgtccgtagtttccttctagcttcttttgatttcaaatcaagacttacagggagagggagcgataaacacaaactctgcaagatgccacaaggtcctcctttgacatccccaacaaagaggtgagtagtattctccccctttctgccctgaaccaagtgggcttcagtaatttcagggctccaggagacctggggcccatgcaggtgccccagtgaaacagtggtgaagagactcagtggcaatggggagagcactggcagcacaaggcaaacctctggcacagagagcaaagtcctcactgggaggattcccaaggggtcacttgggagagggcagggcagcagccaacctcctctaagtgggctgaagcaggtgaagaaagtggcagaagccacgcggtggcaaaaaggagtcacacactccacctggagacgccttgaagtaactgcacgaaatttgaggatggccaggcagttctacaacagccgctcacagggagagccagaacacagaagaactcagatgactggtagtattaccttcttcataatcccaggcttggggggctgcgatggagtcagaggaaactcagttcagaacatctttggtttttacaaatacaaattaactggaacgctaaattctagcctgttaatctggtcactgaaaaaaaattttttttttttcaaaaaacatagctttagcttattttttttctctttgtaaaacttcgtgcatgacttcagctttactctttgtcaagacatgccaaagtgctgagtcactaataaaagaaaaaaagaaagtaaaggaagagtggttctgcttcttagcgctagcctcaatgacgacctaagctgcacttttccccctagttgtgtcttgccatgctaaaggacgtcacattgcacaatcttaataaggtttccaatcagccccacccgctctggccccaccctcaccctccaacaaagatttatcaaatgtgggattttcccatgagtctcaatattagagtctcaacccccaataaatataggactggagatgtctgaggctcattctgccctcgagcccaccgggaacgaaagagaagctctatctcccctccaggagcccagctatgaactccttctccacaagtaagtgcaggaaatccttagccctggaactgccagcggcggtcgagccctgtgtgagggaggggtgtgtggcccagggagggctggcgggcggccagcagcagaggcaggctcccagctgtgctgtcagctcacccctgcgctcgctcccctccggcacaggcgccttcggtccagttgccttctccctggggctgctcctggtgttgcctgctgccttccctgccccagtacccccaggagaagattccaaagatgtagccgccccacacagacagccactcacctcttcagaacgaattgacaaacaaattcggtacatcctcgacggcatctcagccctgagaaaggaggtgggtaggcttggcgatggggttgaagggcccggtgcgcatgcgttccccttgcccctgcgtgtggccgggggctgcctgcattaggaggtctttgctgggttctagagcactgtagatttgaggccaacggggccgactagactgacttctgtatttatcctttgctggtgtcaggaagttcctttcctttctggaaaatgcagaatgggtctgaaatccatgcccacctttggcatgagctgagggttattgcttctcagggcttccttttccctttccaaaaaattaggtctgtgaagctcctttttgtcccccgggctttggaaggactagaaaagtgccacctgaaaggcatgttcagcttctcagagcagttgcagtactttttggttatgtaaactcaatggctaggattcctcaaagccattccagctaagattcatacctcagagcccaccaaagtggcaaatcataaataggttaaagcatctccccactttcaatgcaaggtattttggtcctgtttggtagaaagaaaagaacacaggaggggagattgggagcccacactcgaattctggttctgccaaaccagccttgtgatcttgggtaaattccctaccacctctggactccatcagtaaaattgggcgtggactaggtgatctcatagatccttcctgctggaacattctatggcttgaattatattctcctaattattgtcaaaattgctgttattaagtatctactgtgtgccaggcactttaaataaatattgtgtctaatcttcaaaacaaatttgcaaggaaggtttttggagataaggaaactgagactcaggattaagtaacacacctaaagtcacaggtgagcttggaactgaacccaagtgtgcccccactccactggaatttgcttgccaggatgccaatgagttgtagcttcatttttcttagagactttcctggctgtggttgaacaatgaaaaggccctctagtggtgtttgttttagggacacttaggtgataacaattctggtattctttcccagacatgtaacaagagtaacatgtgtgaaagcagcaaagaggcactggcagaaaacaacctgaaccttccaaagatggctgaaaaagatggatgcttccaatctggattcaatgaggtaccaacttgtcgcactcacttttcactattccttaggcaaaacttctccctcttgcatgcagtgcctgtatacatatagatccaggcagcaacaaaaagtgggtaaatgtaaagaatgttatgtaaatttcatgaggaggccaacttcaagcttttttaaaggcagtttattcttggacaggtatggccagagatggtgccactgtggtgagattttaacaactgtcaaatgtttaaaactcccacaggtttaattagttcatcctgggaaaggtactctcagggccttttccctctctggctgcccctggcagggtccaggtctgccctccctccctgcccagctcattctccacagtgagataacctgcactgtcttctgattattttataaaaggaggttccagcccagcattaacaagggcaagagtgcaggaagaacatcaagggggacaatcagagaaggatccccattgccacattctagcatctgttgggctttggataaaactaattacatggggcctctgattgtccagttatttaaaatggtgctgtccaatgtcccaaaacatgctgcctaagaggtacttgaagttctctagaggagcagagggaaaagatgtcgaactgtggcaattttaacttttcaaattgattctatctcctggcgataaccaattttcccaccatctttcctcttaggagacttgcctggtgaaaatcatcactggtcttttggagtttgaggtatacctagagtacctccagaacagatttgagagtagtgaggaacaagccagagctgtgcagatgagtacaaaagtcctgatccagttcctgcagaaaaaggtgggtgtgtcctcattccctcaacttggtgtgggggaagacaggctcaaagacagtgtcctggacaactcagggatgcaatgccacttccaaaagagaaggctacacgtaaacaaaagagtctgagaaatagtttctgattgttattgttaaatctttttttgtttgtttggttggttggctctcttctgcaaaggacatcaataactgtattttaaactatatattaactgaggtggattttaacatcaatttttaatagtgcaagagatttaaaaccaaaggcgggggggcgggcagaaaaaagtgcatccaactccagccagtgatccacagaaacaaagaccaaggagcacaaaatgattttaagattttagtcattgccaagtgacattcttctcactgtggttgtttcaattctttttcctaccttttaccagagagttagttcagagaaatggtcagagactcaagggtggaaagaggtaccaaaggctttggccaccagtagctggctattcagacagcagggagtagacttgctggctagcatgtggaggagccaaagctcaataagaaggggcctagaatgaaacccttggtgctgatcctgcctctgccatttctacttaagccagggtttctcatatgttaacatgcatgggaattccctgggcatcttcttgtggtgtggagtctgacttagcaagcctcgggtgggtttgagggtcaaatttctaccaggcttatatccctggtgatgctgcagaattccaggaccacacttggaggtttaaggccttccacaagttacttatcccatatggtgggtctatggaaaggtgtttcccagtcctctttacaccaccggatcagtggtctttcaacagatcctaaagggatggtgagagggaaactggagaaaagtatcagatttagaggccactgaagaacccatattaaaatgcctttaagtatgggctcttcattcatatactaaatatgaactatgtgccaggcattatttcatatgacagaatacaaacaaataagatagtgatgctggtcaggcttggtggctcatgcctgtattccctaaactttgggagcctaaggtgagaactccttgaactcctaaggccaggagttcaagaccagcctggataacatagcaagaccccatctctacaaaaaaccaaaaccaaacaaacaaaaatgatagtggtgcttccctcaggatgcttgtggtctaatgggagacagaacagcaaagggatgattagaagttggttgctgtgagccaggcacagtgctgatataatcccagcgctatgggaggctgaggtgggtggatcatttgaggccaggagtttaagaccagcctggtcaacatggtaaaaccccatctctacttaaaaatacaaaaaagttagccaggcatggtggcatacacctgtaacccagctactcaggaggctgaggcacatgaatcacttgaacccaggaggcagaggttgctgtgcaccactgcactccagcctgggtgacagaacgagaccttgactcaaaaaaaaaaaaaagaagtttgttgctatggaagggtcctactcagagcaggcaccccagttaatctcattcaccccacatttcacatttgaacatcatcccatagcccagagcatccctccactgcaaaggatttattcaacatttaaacaatcctttttactttcattttccttcaggcaaagaatctagatgcaataaccacccctgacccaaccacaaatgccagcctgctgacgaagctgcaggcacagaaccagtggctgcaggacatgacaactcatctcattctgcgcagctttaaggagttcctgcagtccagcctgagggctcttcggcaaatgtagcatgggcacctcagattgttgttgttaatgggcattccttcttctggtcagaaacctgtccactgggcacagaacttatgttgttctctatggagaactaaaagtatgagcgttaggacactattttaattatttttaatttattaatatttaaatatgtgaagctgagttaatttatgtaagtcatatttatatttttaagaagtaccacttgaaacattttatgtattagttttgaaataataatggaaagtggctatgcagtttgaatatcctttgtttcagagccagatcatttcttggaaagtgtaggcttacctcaaataaatggctaacttatacatatttttaaagaaatatttatattgtatttatataatgtataaatggtttttataccaataaatggcattttaaaaaattcagcaactttgagtgtgtcacgtgaagcttaatataaacaagtttcttgtcactgccaccaccacgaccaaaaaaagctaatcaatcactatatataatacatatatatactatatataataaatatatatactatatataatacatatatacactatatataatacatatatactatatatacacatatatactatatatacacatatatattatgaatgtatatatatagtatatatagtatatatactatgtatgtatatatatagtatatatagtatatatactatgtatgtgtatatatagtatatatagtatatatagtatatatactatgtatgtatatatatagtatatatagtatatatactgtgtatgtatatatatagtatatatatactatatatgcatacatagtatatatgcatatatactatatatactatatatttatatatactatatactatatatactatatactgtatatatactatatatgtatgtatacgatatatatatatactatatatgtacacacacacatatatatatacatataagcacctactacatgccaggcatcattaaatgtgttgcatccat

SEQ ID NO: 26 - DNA, 6831 bp, Homo sapiens
tccataaagtggaaaggagagtgcgtggcttgaaaagtcatcagtgagtgtttaattcttctttaatgggtgtcttctattattattattattctacagtgcaatttagtcatcaaatattacaggcagtggctcacgcctgtaatcccagcacttcgggaggccgaggcaggctgatcacttgaggtcaggtgttcgagacctgcctggccaacatggtgaaaccccgtctccacgaaaaatacaaaaattagccggcgtcgtggcgcacgcctgtaatccccgctactcgggaggctgacgcaggagaatcgcttggacgcaggaggcggaggttgcactgagctgagatcgtgccactgcattccagcttgggcgacacagcgagactctgtctcacaaaaaaaaaaaaaagaaagaaaaaaaaaggaaagggcttcgagatggctggttgaaaactgtctccgcgcctcacagtccctcttctctcccttatgcctctgagtaaatcttgagccctttcactccctttctcgctatttaaagtatcaaaaccataactccccattcgtgcctctttccgcctgttcccggcggaacactcctctggccttctcttgaggctcccagttcacgctgcacagtgctgggcactgcctcctctccacacccctagcgccccccacccctcagcagaagggcccgcgaggaaccgtgcgaggtcaggccgagcgccggcaccgccaccggcactggcgctgagcgacgagagcggactcctgcgagcgcagagagggagggggagatggagggctggatgagtcacgcggataatcgcgctcttctccagcgcgcagacagcgcggcaagcgcgtatgctagcaggggtgcggacgcgtgaccgtgccgcccgctgaccccaccagtcttcgcgggcttcgaacccagggagccgacaatggcggtgagtacggccctggtcgcgcagcgaccgaacctgcgcccggttcctcgcgccccgcgctggggcggacgccgccgccgccgccgacaccactgccgccggcgtcagctcggctccagcccgccagctgcctggctggcgtcacggcccggcccagccccgcccgcgcccctccttcccctcccccgcccccacgtgcgccgagtttgttgatttagctgccatagcaacgatggaagggagcctcggggggggcggagagaagaaagggaggggcggggcatgggagaaggcggaggaaaaggctgtagcgaaggaagttataagtaaggaacgcgcgccggcggccggcagtttcccgaccagagagaacgaacgtgtctgcgggcgcgcggggagcagaggcggtggcgggcggcggcggcaccgggagccgccgagtgaccctcccccgcccctctggccccccaccctcccacccgcccgtggcccgcgcccatggccgcgcgcgctccacacaactcaccggagtccgcgccttgcgccgccgaccagttcgcagctccgcgccacggcagccagtctcacctggcggcaccgcccgcccaccgccccggccacagcccctgcgcccacggcagcactcgaggcgaccgcgacagtggtgggggacgctgctgagtggaagagagcgcagcccggccaccggacctacttactcgccttgctgattgtctatttttgcgtttacaacttttctaagaacttttgtatacaaaggaactttttaaaaaagacgcttccaagttatatttaatccaaagaagaaggatctcggccaatttggggttttgggttttggcttcgtttcttctcttcgttgactttggggttcaggtgccccagctgcttcgggctgccgaggaccttctgggcccccacattaatgaggtaggtgaggcgcgcggcgctgggagcagggaggggtgaggaccggtgggacgcgccggaacgacggccgaaagccgcccctgactctcctgtctccgctccctgccttgctcgcaggcagccacctggcgagtctgacatggctgtcagcgacgcgctgctcccatctttctccacgttcgcgtctggcccggcgggaagggagaagacactgcgtcaagcaggtgccccgaataacgtgagtatcgctccgggccgccgggaacgcccggtgggttttcgtgggtgtggtgggggcgggcggagccttggggtcaccaagagccactgaacgagggtaaggagcggccaccgcgcggactccgcaaccttcccgggatagcttccgtgtccttggctcagctgtgtatgcccgtggtgcgagcactgcggagccgcctggggcgcaagccgggtcttcaccagtccccgggcgcgctgtcggtagggcgggcgctctcgggccaccgggcgggaggtggccgcgtccccagacactggctgggccagagtgagtttagcgcgtaggcggccccgtggcgagagcgcaccgagagagcctcggtgtgccaattccggggacgtccacgggacctggagggggagggaccagccgcggcgctcgctcacacgcaattgggcagacaggacataacacccgcaatacagacgcatcacctcttcttcgacccgggagtgggccgagattgcagcgctggcgccctgggttcccgggtgcttcctgcctgaccagtccccatgtctgggcggtgcagtcgcgcgtggcccgccagcacgtcagtatgtcgggtggcaacaggggaccaccactgacaggtctctcccgccctgtccccgcagcgctggcgggaggagctctcccacatgaagcgacttcccccagtgcttcccggccgcccctatgacctggcggcggcgaccgtggccacagacctggagagcggcggagccggtgcggcttgcggcggtagcaacctggcgcccctacctcggagagagaccgaggagttcaacgatctcctggacctggactttattctctccaattcgctgacccatcctccggagtcagtggccgccaccgtgtcctcgtcagcgtcagcctcctcttcgtcgtcgccgtcgagcagcggccctgccagcgcgccctccacctgcagcttcacctatccgatccgggccgggaacgacccgggcgtggcgccgggcggcacgggcggaggcctcctctatggcagggagtccgctccccctccgacggctcccttcaacctggcggacatcaacgacgtgagcccctcgggcggcttcgtggccgagctcctgcggccagaattggacccggtgtacattccgccgcagcagccgcagccgccaggtggcgggctgatgggcaagttcgtgctgaaggcgtcgctgagcgcccctggcagcgagtacggcagcccgtcggtcatcagcgtcagcaaaggcagccctgacggcagccacccggtggtggtggcgccctacaacggcgggccgccgcgcacgtgccccaagatcaagcaggaggcggtctcttcgtgcacccacttgggcgctggaccccctctcagcaatggccaccggccggctgcacacgacttccccctggggcggcagctccccagcaggactaccccgaccctgggtcttgaggaagtgctgagcagcagggactgtcaccctgccctgccgcttcctcccggcttccatccccacccggggcccaattacccatccttcctgcccgatcagatgcagccgcaagtcccgccgctccattaccaaggtcagtcccggggatttgtagctcgggctggggagccctgtgtgtgctggccccacttcgggacacacgggatgatgctcaccccaccttcttcacccctagagctcatgccacccggttcctgcatgccagaggagcccaagccaaagaggggaagacgatcgtggccccggaaaaggaccgccacccacacttgtgattacgcgggctgcggcaaaacctacacaaagagttcccatctcaaggcacacctgcgaacccacacaggtagggggacaaactgcagaagggaggggggttagcttccagccccataggctaccagtggacactcctcagtgcctccttgacttcccaggttagcttccagccccataggctaccagtggacactcctcagtgcctccttggcttcccagggcagtctatcgccttgatctccgggatcactggagagaacagcaaaccggcgcctacttttctgcccaggagccttttgcttgatggatggtatctgtgtttgaatgtgcaattttgttaggcttttaaaaggcaggagattccccgcggtctgtgggcctctcctagcttggcattataatcaagaaattatactttgctatgcaaaagcatgatggcttttttaaaaaaatcgttttttaatgttcccttcccaggttcaccctccctttttgttattttgaattctggtcgtaacaattcggtcttacttttttattttttattttttgttcgttttgatttacatttttattttttttcccccacaagcagaaggttttattttaaattccaagaatatgatggtcaaaattgctgggaagattctgatttagggttgtcactgcagagcatttccatgtcaatgtaagtaggtacccaaagtcgtttaggtgcagcattcagtaacgtaaaggtaaagaaaaaaaaagtagccacctgtggctttttatccccagtcgtagtaggaataagattgcatggtttgggcacactaccaatcacaatttccaaatttcatttccaccactgagatgccttgactcaaatgaaacattagtataggtttaggtggtgtttgtgtgtttttggtgaaacattagtataggtgtaggtggtggttgtgtgcttaactgaccccctaaaaacaagaccaaatacttaagcacggaatgtatttctgtttatgatatggaattcaatacaccccttcagtggtataaagacattcctggatttctttaggatagggtcagagttggtttactatctggccttcagtttttaaaaggggcgattctttgatatagcaatagcgtcaattttttttttcttttacctttacaggtgagaaaccttaccactgtgactgggacggctgtggatggaaattcgcccgctcagatgaactgaccaggcactaccgtaaacacacggggcaccgcccgttccagtgccaaaaatgcgaccgagcattttccaggtcggaccacctcgccttacacatgaagaggcatttttaaatcccagacagtggatatgacccacactgccagaagagaattcagtattttttacttttcacactgtcttcccgatgagggaaggagcccagccagaaagcactacaatcatggtcaagttcccaactgagtcatcttgtgagtggataatcaggaaaaatgaggaatccaaaagacaaaaatcaaagaacagatggggtctgtgactggatcttctatcattccaattctaaatccgacttgaatattcctggacttacaaaatgccaagggggtgactggaagttgtggatatcagggtataaattatatccgtgagttgggggagggaagaccagaattcccttgaattgtgtattgatgcaatataagcataaaagatcaccttgtattctctttaccttctaaaagccattattatgatgttagaagaagaggaagaaattcaggtacagaaaacatgtttaaatagcctaaatgatggtgcttggtgagtcttggttctaaaggtaccaaacaaggaagccaaagttttcaaactgctgcatactttgacaaggaaaatctatatttgtcttccgatcaacatttatgacctaagtcaggtaatatacctggtttacttctttagcatttttatgcagacagtctgttatgcactgtggtttcagatgtgcaataatttgtacaatggtttattcccaagtatgccttaagcagaacaaatgtgtttttctatatagttccttgccttaataaatatgtaatataaatttaagcaaacgtctattttgtatatttgtaaactacaaagtaaaatgaacattttgtggagtttgtattttgcatactcaaggtgagaattaagttttaaataaacctataatattttatctgaataatgttttttattgttttgttttcctcctggaaaaatatgaacagtgtttggtttaaacacaccgggttaataaggcatgtaagaagcacgcacaaaaaagccaactttatgtcaacaaattaaaatacctttttttattaaaaaaaaactatttagttttaccataaatactatcaatatagggctgagaactcttgattattgtacgtttaaaaattacaagattaaaaacccagttcaggtttgctctttccaaatgtacgtaaagctacgtgaaagcagtttccttacctatgattttcccagtagaaacagcttaatcatccttaaatttgctcagtttagtatgaaaatatttatgaaatatatacatttcagtttcatatttgaaaaaaatctttatggtttgtcttttaaagtaaataaaaataaaaaagttttctgtggaggcctgtcccagcacccctcacatctgagtaacaaaagaaccttcctacagcagacaaccctaagaacgtagttccacagtgccctcctgaggattaaagggttcatttatgcttggtgtgtgttaaagatacatcacttctactagtta

SEQ ID NO: 27 - DNA, 23767 bp, Homo sapiens
aatattaaacatttttgtagagatagggtctcactatgttgctcaagctggtctccagctcctggcctcaagcaatcctcccatcttagtctcccaaagggctgggattataggtgtgagccaccatgcctggcccaattttatatataaagatatatgtgtgtgtgtatatatatatatatatgtgtatatatatgtgtgtgtgtgtatatatatacacatacacctttcctagaagaggaattatctatcattttcaaagttatttacattttagcctttttcatacttattgtcaaattgtccttccccaaagttttaaagtttacacaaccatcaacagtgtatggaagttaaggcatgaagaactcacattgcttttagcactacttttacacacttcatctataaatcaacatctaaaagagtatttccgtgtgacccatgcacggttcatttgagcattcacagggtgttccccacagcctggtacattacagcttttgtcataacatgaacagcaatcggctcaaaacactgcccattgtgatgctgatgatgagacctccctaatgttctaaaagattgtttggtgtaaccactttagctcagacctttcttttaaccttgcctatcatgtttcgagtcagaatttaaatactgtgcagtttaagctacaatacgcttggcctataacttggttccaggcatttatatttatgtcacttttgtctacttattatactaacaaggtggaaaaagcaatcccagtctctccaaaaggtaaaactctcctgtttttttggatattattagagttttaaaattaggctagataaattatagtacccttaggaataagtgcataaagggagttttatgaaatattttaagaagaacacatttaaaaatccaaactgaaatataaaatgtaatttcttaagaactggaggcaagagacattacaaaaataaaatattaaattgttgtcttaagacataattttaattaatataaatagaagtatttagtcttatttaaactgcatattttttcatcacaaaagcaatgaacagagcatcttctctcttgtctcgtaatcttttgagtcaaaatgctttaaattccaactaatctcagttgaagcttctatttatcaggctatttccttaatgactttttttctgatgtgtggctttaggtggttgccattaatgaaaaaatacaaagactacagatgtgaaatgttggagaggacaataattacaatagttttaagttttcactgatacagattctaacaggggtgtgcaatcaatgactaccaaaaagtcactttaattaaataatcttaccctagagaagagtgtgctcccgtataaagctttatttttcatttttattcttgttcttttttctgtggcccaagatcacttggcaatttgatactgatttggcagaaataaatattctatgaatatttttctactcaaagtgaatacagttttgttggctgtgatactctatacctcttaatttcaagctgtgacgtttttgccaaacaactgaatttagatttgccaaacaactgaatttagatattccttttgccgtgtcgttgtgtgaacattgccctagtgatagcttcatatttccctcatctcatcattcagaagctatttatctatttttttccactgcctccttcaaaccccctcccccaacattgaatgcctgttcagcccccgcatattcatccgtatttattcccgtaaagatagtgacacttatggtttattctaagactaaatctgtgttgcccagtgactaaggacttaagcatgcacactgcttctatgcttaccctcctacctaacttgactactcaacatttttatttcattccctcagaatcccctgttttggcacagttcagttaacacaccactgccaggccactaattgatttctgaaacctgacatttgttttttgttttctcctatcttccctaatggtacagcactactaagcgggaaggaatgcaaagaactagaaagttcaaagtaattgaggatctgtccattcacactgtctggcttcaagccaatgtagaacctggaacatttgaaaaatatttatcaagttttaaccctttttactaagtcggtgaaacaggtttgcagctgtagcatttatgttaaaagcaacagcaaggaaacttggtcgaacatgttctttatatgttcagaatcacatggcaaatgtctccgaaaaggattactttccaatttccgtactattgtacagtgctaagctagttattttctgtgagactgcagagcagggcatttcagagaaactattacttaaaagtggcagccctatttcatgaatctttatgcccaaaatggaattttaaaacctgctactgtattggagcaaaaaggaatatattcagttactataagaaccccaacgctagcttcatatctatattatgaaaagtggaaatatgaaaaattaacaagactaaaaatattaaaaacttagttgtatggttttttttttgcaatgaaaaagcttttgtaaatgaaagcatgttaaaaagtggtgtgaaattatagaagcatttccagtaaaatacatggattttattgcagtgaaaacttaggttgaaagaccgggccactgaagctctcgtaaaaagacaaaaggaaaggtctagataggtttaaaagcacattaagatacagctaccgaatgtattaaatctaagttagatttagcttaaagttacaagagcacaaaagttctattaagaattatctacatcacatttaggtttgatgttatcagaattaagtaactaaaaatctttcaaagctcaattttttaaaagagttacattaaatcccatcctaattctataatctgtttctaagctaattaattacatgataggttttacattagagaaaagcaggacagctttttaaagatgaagatggacagcatggggctgcttggttagagaaaaacttgcaaaagcacttattaaataatactttgataacatgaaagtagtcatcagccattctctgaaggcagtgatcacagctataaaaatgaatcatgtgtcaacaggaagagaaggaaaaggagaaaaacccagtttacagcataattttatattttctaataataaatacatttctttatgtgcatattaattttctacccattgaaaatgagatccatacctttgatagatacactctttgaagtgaacgtttttatccaagacttttttttaaagctgttttactctgaagtgatgaataggctgtggtatatgtaaaactgtctaatggtatattgtgtgtcaacatatgtacatttgtagtaatatcacaggcatttttattgcagtttattgttccgtcctcccaataagccagataaaatcatgtacaagaacattaaggattaagggaagtggtttccttaggtgattgctggcaaaaattcaccctcccattataacaacatagtaaatggatggtaatatatttggctattactttccaacaaatttggattcccagttttcagagctgctctgtgtctatgtttgcggctttttgattgtctcttcgtaggaaaaggtgccacaatgtgaggtaaatgtgctaggtttctgctttgtaaatattaaagtccattttttgaacatacagtgctagcaaaaataagtcaaagatgtaatgtctatttaaatacacgtttgagctagtcgtgcttaaattagattccatgcttcggctagaatcaacacggcttaaatattagaaacttcaaaattcatatggcccaagccctcctccccacacacggatgggaagtagaaatgtgtgggaaaacgtctagcaattaaaatcctgaaggagtgggaaaaacccaggcttttatgcaaggatctgaaaaaacgcttgccatcaaatcttttattcaggcattctgaatttgccttgttaaacggatacactcactgctaaagatacacagggacaagagctgttttaaatttgtttatcacaccgcccctagttttctgctaaagagaagtacattttggatatttaaaagtacacactcattagacaaatctctaaaagcctcagcgcccctacctagctgccttctgggtttcagcttttgagtttcaggtccttgcacaacacctaagacgtgcaatactctttttcttcctaatcctggcagagaacagtgcgaagagatctccctccgcgtctccaccctaattccccctcttcccagattccacccgctccgctacttccctccgcccccggctccgccagcccaatctgtcagagaagttgtgtacaaactgcgcggccgccctgcgcgcgaagctcgtggcccgagaggggtgcggtcgggccgacggaggcggggccctggctgcctctctccctgctcataggctggccgctcaggcctggccggcctcggggcctcgggattcgcggcggcgctgccaatcaggcgatcgggccccgcccccccggagttgggtgaaatagaggcgggcgtcaagtgtcagtagtcgcggggcaggtacgtgcgctcgcggttctctcgcggaggtcggcggtggcgggagcgggctccggagagcctgagagcacggtggggcggggcgggagaaagtggccgcccggaggacgttggcgtttacgtgtggaagagcggaagagttttgcttttcgtgcgcgccttcgaaaactgcctgccgctgtctgaggagtccacccgaaacctcccctcctccgccggcagccccgcgctgagctcgccgacccaagccagcgtgggcgaggtgggaagtgcgcccgacccgcgcctggagctgcgcccccgagtgcccatggctacaagggtgctgagcatgagcgcccgcctgggacccgtgccccagccgccggcgccgcaggacgagccggtgttcgcgcagctcaagccggtgctgggcgccgcgaatccggcccgcgacgcggcgctcttccccggcgaggagctgaagcacgcgcaccaccgcccgcaggcgcagcccgcgcccgcgcaggccccgcagccggcccagccgcccgccaccggcccgcggctgcctccagaggacctggtccaggtaggaagagccgctcccctcccaccgcagcactcccgggctcgggcgtgtcccgttgctgcgactcgcgggcgacaggggccgctccaggctggggcgtgcgtcggggcgcaccggagccggtgctgggtgggcagccccgccctgcacgcctggccggggccccgcgtttcgctgagagtaaatgggggggggggccgggggtgggaaggatggaggggaatctgccccggcgggtcggcctgggagaggtaagagggagggaactgggtgctcacgcgcaccttagttgtttttcttacacttgagggacgaaaccttgtaccttacgctcagttttacttaaattacgccttcgcctgtaccgctctccaatgccaaggcattggagccctcccccccatccccatcgtctcgggttaagtagaaacgcaaattggggtgctggggagaggttccccaaggtttcatacccggtggctcaacctgctttagaagcgattgcgggccgcgtttggaaaatgagagttaggaaagctaaggttgtgtcggagcgcttatttttccttaaaaaaaaaaaaaaaaaaaaaagaccgggggtgttgttttcttcgtgtgcacgtaaatttcctcccggagccgcgttgaaagctggcagttggcttttacacttgcccagcagccgaattagagcaaccgcctgtttctttcgcccacgcagggagtcatatagcccagaaaaaacttcccgggacttttagcctgtcccaaggaaaaaaaaattggaaacatacccacatgcaaacagctggaagagctaaaatcagaaaccactaaccgccgcgggagcgcagtgcacgaaagggtttagttcagtttatttcaagacacttcatttagtagctctttggcgtgtcgtatatttgctacccagcgcctactccgtggggtctgccagggtcttgctgtgagagggcagtggcgtttgtcagagatgtgactcacatgatgagagcgttaatttttatttttaaatcatgtctatccgggaaaccccgtccgcatccacaccaaggtccgagatgaaacgcatttgaaatgaagtagtagcagaaaatgactgtcttatttacctgttaaggtgccacagctaatatatgcgccattccatctagttggttttcttatctttcgaaatttccttttcagtgttaaaaaatgtaggcttaagttatactaggagagaagatagctggaaaaggcttgaggcgacttgttacaagctggtttatagcctagaaaagagatcaccgtttgaaaagtatttggttatttcagtttgtcaattttctgctctggaggcactaagaagataagggatgactgagctttttacagagtaggggggaatgtagcattggcccactgagaaggacatgataaatgttttgctgatgactgtgctagggatacagcagcctccccacccacgggctccttagcagcactctaccaagggagtgattttcccctaggtaattaaagatctgttttagatagggatatgaataggaacatttcattatcatattaaccaattacaggatctgctgatgaaaatcaacatttagatcaaatattgaatgtgaaattgttttgtttcagtggatacaaggttttgcttagaacgttgtgtttaatttctcattgaactgtaaacaagaaaagacactgaaatagccaaataatatttttatattacttttgaagtatctagtcaagaaaagaaacctgtgcaatattttaaaggtttgcatcgttttttctattaaaaaaaaccacgctttttaatgtttgtgacttaaacagaattgaggtagtttggcaacatttcaatactgtactctaattgcaaacttaactgtgtaatggggcagggaatcctgcttgtacaggggtgatggtaccttgttattgcatcagaatggaatgttttaagtttgctttcttttttattcttgatttgcgtctttcacttttgggggtgattgggggagcagttttaccagttacacagagtttcataaggttttggtcaaccagttattacacaatcgacaaaataagcctgatatgtttataagcaacactgaggagtttgccctagtaccttacacagggattgggggaatttttagtaggcgccgattgttcgttcttcccgagatggtgaatcaggtggattatgcattttatatctcttcttttttagacaagatgtgaaatggagaagtatctgacacctcagcttcctccagttcctataattccagagcataaaaagtatagacgagacagtgcctcagtcgtagaccagttcttcactgacactgaagggttaccttacagtatcaacatgaacgtcttcctccctgacatcactcacctgagaactggcctctacaaatcccagagaccgtgcgtaacacacatcaagacagaacctgttgccattttcagccaccagagtgaaacgactgcccctcctccggccccgacccaggccctccctgagttcaccagtatattcagctcacaccagaccgcagctccagaggtgaacaatattttcatcaaacaagaacttcctacaccagatcttcatctttctgtccctacccagcagggccacctgtaccagctactgaatacaccggatctagatatgcccagttctacaaatcagacagcagcaatggacactcttaatgtttctatgtcagctgccatggcaggccttaacacacacacctctgctgttccgcagactgcagtgaaacaattccagggcatgcccccttgcacatacacaatgccaagtcagtttcttccacaacaggccacttactttcccccgtcaccaccaagctcagagcctggaagtccagatagacaagcagagatgctccagaatttaaccccacctccatcctatgctgctacaattgcttctaaactggcaattcacaatccaaatttacccaccaccctgccagttaactcacaaaacatccaacctgtcagatacaatagaaggagtaaccccgatttggagaaacgacgcatccactactgcgattaccctggtatgtgctcttacctggttgaagcatcaatagatgtagtgtgtgtgtgtgtgtgtctgtgtgcgcgcgcgtgtgcgtgtgtgcacgcgcgtgcccttttcaacctcatggctttaaataggaaagttgtacttgacagtaaaaaaaaaaaaaattacctttttttttttctctatcctatctctgtgctttaactttggtatgtaaaccagttagttgtctgttgcttatgttatgcatcaaaaacttggctagaatattctggaaaaagttcccttggatttttttttctttaatattaaaacagatttgaatttctaatacatattatttcgagttaggccagagttactttaaaatggcaattgaataaattgcagtttttaattctaaattaagtgccccagaaagagattaaagtagggtgggggaaaataaggtttggtggtgaagtggaggttgcaggcagctagcttgatgttaggtacaagactgtctacaagacagatttaagaatggttttgatggcacgtgagcatatgctcagttttgaatgacatacatggcccaaagtataagttgaagacaatacatggaatatatttacaagttactgggaaagctagtttatgattaatacatggcaaaatttattgactctgatacatgatatggcatgacgtgctaaatgaaaaaagaagaaatgtgggagtacagaaaattacagtcatcttggataatggcttagtactgtcagctctagagccattaaaatttttaaaaaaacatatagcagctcttaatacggaagtacagcacctactggaatataaacacaaattttccatttgtagtttggcttgattatctgtattctttcctgttaaagtgatacataaaacaaatcacttcatgcctttaataaggtaatgggggagggctctttaaaacttttaaaactgaagcttcaaataatctcatctagcatgagagatttcttctttaaagccagattttaaacactgaatcatcaaatgtaaagatttcaaaaggatctccaaaatgacatgctgttctcctttattttaggttgcacaaaagtttataccaagtcttctcatttaaaagctcacctgaggactcacactggtatgtaattttcttgttaattctgtgagttgtgtaaatagtgtaagtggtattcatccttttaaaagctaacacgtgtttgatctcttctcctgtcaactttgtttttttttttttttttaaatagcctaccttttcagcacaggcttggttcagaattcagttccatgagaaatctggttccaggaaggccggtgatgttccctcactaaggccttcttgccctgtcaccgctcagagttgattacccaaaaatgtaaacagcgatgtttactaatggattttaaaacttatactggcagtgttttgaaggaaaaaaaacaaaacaaaactcattttcttccatagcaaataattttgctctgagaaagccattttaaactcttaaaaactttcccatttggagtgtactgcataattggtgaaaacgttagtttcacctctaggttaaaatatctgtgtttagtatgttttctgtgcttgatgaaaggtagtgctgaaattgcagtgttaaaatcaggtggtcagaaatgggttacaagccccagcctaaacttggtatgtgtgagagacttgatctttattctagcttacattcattcttgtttacatatgcttttaagtttagctcctctacttttgtatttgctttgttcaatctatagcagtcactttttttgagatggagtcttgctctgttgccaggctgtagtgcagtggtgtgatctcagttcactgcaacctctgcctcccaggttcaagcgattctcctgcttcagcctcccgagtagctgggattacaggcccccaccaccatgcccagttgatttttgtatctctagtagagatggggtttcaccatgttggccaggctggtctccaactcctgacatctttatccacctgcctcggcctcccaaagtgctgggattacaggcgtgagccaccgcgcccgaccagcacttttaagagcttttaaactttaaaattatatcagaagccattttaagatgaaaccaggtggcatactttaaaggccccccaaatactccaaatattgtcaaatatatagatggttactatttgcgattttcttaaaagagcagccctaaagaaaagaacttatataaagtgattgtgtttttttccctcaataaatacagccttacctaaagttcagagaataagtttgctaataaaagcaatgacctagcaaaatgtattattccatcattgctatggaaaccaaagtattcaacagttcctttgaatgggttgttggattagtgtgaggacttgaatctcccgaggctagatgttactatggaaattgagttttgataaatgaagtagttatctctaactgctgcattaaaaagtaaaagcctttgaacaaaggtcagtgctgaggtagagccctaagaggaatatggttgcagacattttgtatgcatgttaggaagcattgcttgatatcccagtgataaacactacttactaaaatccgatgacaatgttgtagattccagggctttttgagaaactgcttttaaggagaaggcatcttatgtatttatctatgaaatgagcgggctgttttggcctgaggtttttgcatggagacaaactgattacataagaggaaggatccttcataggcagcccaaggtagaaatttttatagttaaacacaaatgaattaagcatgttataaaaactccaacttaaagttttcaaaatacaaatgacaagtgccaggaaaatattccatgtagaaataccaaaatgtccttttacagaatataaatggaaatataaagacatttgaactattgtttttttcacttttggaagtccttgagagataggagggaacacattttcctgggtttaaagtctcctaataaaagagcacaattgcatataacgatgtaatcaactacttattgcagggatgtagtcaaacccatatctgaatagcctttcaccccgtcagggtttagtgccctgaatgcttatacctgcgattcaggaacttgacctgccggcaaatacatttaatcgtgggttgtcttaacaatgcttgtactaataaaaacagactgaaaagaagaccgagacctggtttgggtcccttgcatcagctttttcacctgaccataaacattgtggccttcaacatctaatgaatgagaacatgtaatccagtttaataaagttttgtttgatagtctttcaaatgccttggggagggtttgtagcagacttgttcatctggctaaacctgttcttgggtaatcatagagcattgaggttgttttctcctcatttctcatttctagacaatgccttttaaaattacctgttctctcattgcatcctccccaccctgcccgcctgttgtttttaaatgaatgtatctgaagccagcaaaggtgttttttttttttctttccctttaaggcccaggtagaacagttaggacagtttttctaaattacttctcttatgtaatagctttttttggttttctttctgtcctcctcctccctctcggaccgttgatcagaggactttaaaaaccacacaacagttgatgacataaaatactctttaaatgattgtcgttttacaggcagaatgtgaagcaccctagcatttctttggaaaataattgtaattgctttaaaatgtcaagttaccttatgttttaaaaataatttaggcaatgaaaacagcctacatctgagtttaattacttcttctggatttttagattggaagtgcttctttaacttgggttgcaaattgaacctaagcaaataatagtcttaacaaaatagaactttttaagtaatctgagatgacagagtagatgatatatcagtttcttaaaccagaagtatagcattcaagtcttctaagttcatatactttgatttctttatcaggaaatcgcatataaataatacaaagttctgtcttctttgtgtgattagacaatactggaaacatttgcttctattctagggaataattatattttatttatatctgtacatacatagtatagcataaggcctgtagaagcaccccttatagatgtggatgttcgcatgtattatttgtagtatgtgtgtgtatacatttatcatgcctttggtgagaaataattatggctgcttctaggtaacaatgtcaatgagtggtgtatttccaattcaaaatatttgtacttttaacagcatttaaatgaacattgtactgaaatttgtatgcctcatgatgtctacaaggggcggaacacattgctattactctaaagttgctcccaagtatactgttttgtctttataaatcaacatgactgataaactgtctattgcaaccagtattatatgctcacataccttacttttttctttaatataatgaacatttaaaataatgtctaagtttgcaaaggtttgaggcaagttgaaatcagtaggaaaatatattgactgtatcttcaaacaaaaatttgtagaaatttaaaaagttcttaccagagaaaaagttctgaaaaagtaaaccatgaactcaacacagatgtttgaagtcctagcggttcccttcatgtgcgtggatatacacttaaccttagagaatatggaaaagctgttgggaaatcagggtacggtaacgtttctagattttttctttcttttttttcccccgtttcagctatctggaacagggcaagaaattagcatttgtacaaagaaagtctttgaacaacacacacttggctcaagtattcctcagacccagactccatgcattggactctgtgtgtactaagtgatcccagagtggcttactggagattgacaatggaaaaggacaatttgaaacacgcccgtaggagaaaatggaaacattgtacaaataacataggaacacaaaattcactcttcttttttttttttttttgagatgaagtctcgctttcgtccccaggctggagtgcaatggtgcgatctcggctcactgcaacctccacctcccaggttcaagcgattctcctgcctcagcctctcaagtagctgggattacaggcgcctgccaccacgcccggctaatttttgtatttttagtggagacggggtttcaccatgttggccaggctggtctcgaactcctgacctcagatgatccacccgccccagcctcccaaagtgctgggattacaggcgtgagccaccacgccagactcacaaaatggactcttaaagcactgtgttcaagattccctgtttaggaaagatttccacattaagtcctggaaagatttttagtggaagcctagtttgtaaaggggttacattcccattttctgccttactgtcttttgcagaagactttattgcctactgacatgtgtagtaagatgttattagttatacttcgtataatctgtacttgagatttgctgctgaatatattgactttcagtttgggtactaaaagatccttagatatgaatttcttttctagggcctggcacagtggcccacacctgtaattctggcacttgggaggccgaagcaggtggatcacctgagtttaggggttcgagaccagcctggccaacaaggcaaaaccccatctccactaaaaatacaaaaattagtcaggcgtggtggcacatgcctgtagtcccagttactcaggaggctgaggcaagagactcgtttgaacccacgaggcggaggttgcagtgagctgagatcgtgccactgcactccagcctgggcaacagagtgagactccatctcaaaaaaaaaaaaaaaaaaaaaaattcctttctaggtctttgctccaaagtcatttttcatggaatatattaaacatagcttttggttttaaaatctcgataatatttggctgggcgcggtggcggctcacgcctgtaatcccagctctttgggaggcggaggcaggtggatcacctgagttcaggggttcgagaccagcctggccaacatagtgaaaccctgtctctactaaaaatacaaaaattagctgggcatggtggcacatgcctatagtcccagctacttgggagcctgatgcaggagaattgcttgaacctgggaggcagaggttgtggtgagccaagatcatgccaccacactccagcccggacaacagagcaagactccatctgaaaaaataataataataaaaaataaaaaatcgataatattgacaataaagatattttcattgcaggtacttactaaaagcaacattcagtgttctgaacataagttactcttctttttgtggaactgtgggaaaagggtaaaaggctttttaggaaaactgtatacaaaggttttcactctgggccttaatggatggagatcttacaatgtgaatcgagaaataatagtggttaaatgtgtaacctgttttattggtagagataacacaggcaaaatcttttttgcaggaagagatttaggactcagtggttttttgagtctctatttgaaaactattgcagaggaagtatcacatttattagcctttagtattagattttattaaacattcttttcattcttttccatttttttttcatttgcagctttgaaatttattttgtgtattgataatttcaaacaatttttttttaaagtagtagcttaagagacttgctggttcagaccccaggaaaggtatttatgagcatgaaagcttagaagcaatttctttttaatgactcactgggaagattaaactttgcttctaggacttgttctttcttctgagaaacatttacataggaaattgattaaacattgtttagagatgataaagcttatcaaaagttaagtataatttgattcagcaaatattttttactggttttgtggagaatccaaagatgaataatctcttcttgcccttttgttcatagactaaatagaattgctggagtggagatagaaataattagtcttgaaagtagagagtaatgtttttaaaaaataataatacagtcacccaagaatttggcagatatttttggttctatagaatgtagtagctgtttacttgatggcctacatcgtttctagtgaaagattagaaataatgtcctactttagtaaaagtatctccgtagcagcattcctagtctgttagccagtattatttatattcaaggatctcaaacaacaactcttattaaggataagttacagttttagaagtgcacagtaggtaacttttacctaaaaatatctatatagaagaataaatttatttttggctactttatgaaaaggtaaacctttacgagttgggaggagacctactggtcagggtcaccatgtgaagtgcaaattaaagggaaggttatctagtactcattccatactgggaaaaaatgaaaatagaggatttttctgttttgcttacaaaaagaaaaggtgaaattcctcattgacactttaacgtcagtgcgaactcccattataagaaagtgaatccgagtgttgtctcgttatcaggagacggaagaattggtatttgatttcattaactctattaatgacaggggatagtcttcataatgtttactgggaacccagaggagaagtagcagtagtttaggagcccagagattccaaatctctgctaggatgtagactgtaagtgtaacccctgacatcgtgatcccacccattccctctctgggtttggcagatcagtgctttctggccctgggagaagtcccctcgctgcctttgaccagtgctaggggctctagtatgtcttggctttcctgaagtccagtccagttctacctaagacaatttgtttaaacagagtttatccctgtataacttcagaatggacaataactcattcgattattttctctggaagtggctcaaaacatggttctcacctaaatgcgtattaccagattactctcagtggtcctgggcagggcaaagccaggcaaaagccctgctgcaggagggtccacagaagaataaaaagctgacagcctcacaagaaccttttatgccttccctccttttctttaatcagaataactgagttgttttcaagatgcattagggaaagtgtggcattacagcaggaatagaagatagtctctgcccttgaggaactttaaaagctagttaaggaggcaaaatacaactatttgaagccttcctaaagcagtatatgtgcaagtgcaaattgatagctcaacagaaatttcagtgatggggatacagagaagtgaaatgatctctcctggtctgttcagaggctttctagaaggagtgaggtatcggattttaaagaaagtgataaatataaattgaggagagaaaggaatttctcttttgttgcttttgtttttgtttttggcaatcagcttccttaggttgaatgggcacaatattgatggtgttatctggtaaataattagatgcatttacaaatgctaataatactaatctttgatatggaccttctgttccaagtataggaaatgtgtgacaatgagttttaatagaaaggtttttgatggaaaattactggcatagacgtaaaaatatgaattagtgagctaaaatcatcctcctactttatctcttttcttagatatctaaatcattttcctatgaatttctttaataagtgtttcctatttttctcccttttgatttttagaagcaaatctaatatgagcctatttcagagactaaatttcgtaagtctcaaatgatgggaaaaatctaattattattgaattgcatgaaaatattttcctcttgaaataagagcccattttgagcttcaaggactcttaagttctaagagtttagattaggttgaaataatttattctactttaaaagtttggattgtttaggttcgcagaacaagatacaagattttaagttctttgaggccagaaaccaagtcttatttgagttttgcaaggcatttagtacaggttacaccttcactaataaacagtgactttaattctcatgatattttagctttatcagatattgattgagttgtcttttagtcaccaggaaggaaaccgatgtgtaaatttgctgcaataaacttttaaaacattatctaaaataactattttaagataaatattttatcagtgatttttattcttttgttagaagaatctatgtagaacattttagggaaaggccttggtatgtctattgaatgtgttcagcagagcagagaaacttcccattccattgtgataggttcagaagtcattcagaggggggaaaaaaaaggacaattttcagtttgttgctgaggatttttaaaatggcttacaaacatgttccactaacccactgaaattcacttaccctgggggaaaggagctatcgttaggtgatacctgggaattggcaatacctgaacagtgctcaggaccccacaggccccacagaggctggcactgccaggttgtgctctctgtttcagatcgtctggggttcaaggcttgctgtgagtccattaagccattccttagctgaccttcgcaagtggctttagaatctggaaatgaatttgaacaatatgtatgtgttccttaaatcgttcaaagagagtgtattagtgtttgctaatggaagatttaagtgagacattaaggaaaagtggcagaccaggattcttaatgtggagctcatcgttttgcttctaactctacggggttattgtgaggaagcgagataatgagaagtacctcgctctggagtatgtgctccatggctgctggtgcctgctcccttttccttttaccggtaatgtttctgcttaacatttttgtaaagtatgttaatgactttatcagcgtggatagtatgcatgtttaacttgaacatagttttcaaagattagagattctagcaaaatactcctgtaatttaaaaacagaatgagaaaacacatactttgagataaagtgggagcttgttttctgtgctgtacaaacttgtcacttttttctttttgcctttggaaagtttcacgttaacagcatgagaacttaaaaatacagttgatgttgaaagagcttaactaaatattttaaattggtggtattggaaagagattctgtaaaaatccaattaaacttttgaaagctctatcctgttgaaatataacttaaaggaagtcagtttggtttcccagaagtactgtgcatagtgtttctggctgaggaagaaaggcccaagtctgctgtttggccagaaattgggtaccagtttcctctacgatgttttacttgaacggtgttgacacttgaacaaatcccatagaaactgccccaagtggggggatagttgtccttacttttatggtaagacttggccccagtaactaacattccagacactggtagtattcttggctgaatactctatagatgtgcataaattgagagcaaaaccccaaatgttttagaaactttaatggctaccgtatttcaagcaatcagtaaagtaaactttaaaaaatactggtgcagtttattgcttcatagccaataaaaatagtgaacaaaaagagtctagtgtcccttgtttcttacataaactctgaaaattcagttctgctatttaattattaaattcaaaagactagaatgatttcttttaaaattgggagcactataggaatttttttccttgtctcagacatcagaaataactttttctttccattaaatgacagtaaagtatttaaccaatatgtttgtttctgtggtttatttttcacagggaacaaaaactaatagtactgtgcaaaaattttttttgtgatcaatttacatctacaaatgtgatagctatatttactactggtgttaaaatatttctatatatcagacattttatgtgattgtaagtgacagaacgtgatttatactttgttttgtaaatggcttgagtgtcttaggttaaatttctggttagaatctactatgaggggagaaaaaacttctagaattgagatgttcatttttaaagtggattgataggaaccagaaagggaattaaaacaaaaactgtctgggtcagaggcagaggagagaagagaggaagtatggcacagcaatccataccatgggaaatgtaggtgaactctcaagggaaaaaaaattgggaccactttcatgtcgtctgttttggcactttcttctttgtctgagagtcagagtggttatcatgacaacaaaaatatattaaccacaaattgtagaaatctcagttgatgaggacagggtcttttaaagtttagactgacttggttaatcctacaacttcctgaacatgatactgctaaattaggcagaaaggttgtgcagtttctgtttcgtcagaactaaacaagtgttcaaagcaactctgaggttcctccctttcagaaggaaacatttttttaagggaatttaagaggtgaaaaagtatctatataaaactcagcagtaagccagtaatactttaatatacaaatttatctcacgaattcttataaaaaattcatagaaaattataaaatcataaatgtaggaactgctagttaatgctcactgaaagaacgttttggcatttattcctactggaatatatgatctccagtaggattcttcacaaacagagaattaagactacattatgaatatttagtggttttgaaagttaaacagctggcaagctttggggagcattaggaataatatacattacaggatgggagggaggaacataccaactcaatactcaagggaagagaactgtgaaagaatggaatgggtaggttgaacaatttcagacttttagatgtatattacacatgtaagctccatgaggccaactgtttttattttgttagccattgtatcacaagtatttgggacagttcctggcctataatagatgcttggcgaattgtttatggaatgaattttgggtgtaacacatgacaaagaaaaactaaatacaagtcaacaaatgtcagtttttacagttgtttcatggtcttttttttttaccaatgtgaagttatcagtaccagactattttgcttcaatctgcaaaaggaaggtgtgtgaaggtgtgtgtgactctcaaagagtgaatgccctaatagtccattttggaggccatgttttcaagtgaactgattgatgagctgcaagcttctgtctggctaatttagaaacatctaggaccagtttctggttaagcagttgtggtacatgaaattcaatgtataggtgattcgtgcaacagcttctgaattttttcctccctcacccaccttacagccattagtcctataataatttaatttgggtttgttggtatagaaactgtatttgcacaataatgataaagccactcaggctcatctagtcatttcctggatttatgtgtgtaggagtacataaaaataagggcactgattcgttttgtacttgtctaaaattgttattcttcagttgttcaaaggtacacaaaatgcttttttctttatgaggtaaaaaatacttggaggttataagaaataactcttaactagcttactttgagtggctttgatatgtatttactcataatggaattcatgagctttccttctttcgcttggccaagattttttttttctttgaaattccttctccggtgttatctaggatgtttgcattacaagcaggccgctttacctcctttgttcgttgtcacaggtgaaaagccatacaagtgtacctgggaaggctgcgactggaggttcgcgcgatcggatgagctgacccgccactaccggaagcacacaggcgccaagcccttccagtgcggggtgtgcaaccgcagcttctcgcgctctgaccacctggccctgcatatgaagaggcaccagaactgagcactgcccgtgtgacccgttccaggtcccctgggctccctcaaatgacagacctaactattcctgtgtaaaaacaacaaaaacaaacaaaagcaagaaaaccacaactaaaactggaaatgtatattttgtatatttgagaaaacagggaatacattgtattaataccaaagtgtttggtcattttaagaatctggaatgcttgctgtaatgtatatggctttactcaagcagatctcatctcatgacaggcagccacgtctcaacatgggtaaggggtgggggtggaggggagtgtgtgcagcgtttttacctaggcaccatcatttaatgtgacagtgttcagtaaacaaatcagttggcaggcaccagaagaagaatggattgtatgtcaagattttacttggcattgagtagtttttttcaatagtaggtaattccttagagatacagtatacctggcaattcacaaatagccattgaacaaatgtgtgggtttttaaaaattatatacatatatgagttgcctatatttgctattcaaaattttgtaaatatgcaaatcagctttataggtttattacaagttttttaggattcttttggggaagagtcataattcttttgaaaataaccatgaatacacttacagttaggatttgtggtaaggtacctctcaacattaccaaaatcatttctttagagggaaggaataatcattcaaatgaactttaaaaaagcaaatttcatgcactgattaaaataggattattttaaatacaaaaggcattttatatgaattataaactgaagagcttaaagatagttacaaaatacaaaagttcaacctcttacaataagctaaacgcaatgtcatttttaaaaagaaggacttagggtgtcgttttcacatatgacaatgttgcatttatgatgcagtttcaagtaccaaaacgttgaattgatgatgcagttttcatatatcgagatgttcgctcgtgcagtactgttggttaaatgacaatttatgtggattttgcatgtaatacacagtgagacacagtaattttatctaaattacagtgcagtttagttaatctattaatactgactcagtgtctgcctttaaatataaatgatatgttgaaaacttaaggaagcaaatgctacatatatgcaatataaaatagtaatgtgatgctgatgctgttaaccaaagggcagaataaataagcaaaatgccaaaaggggtcttaattgaaatgaaaatttaattttgtttttaaaatattgtttatctttatttattttgtggtaatatagtaagtttttttagaagacaattttcataacttgataaattatagttttgtttgttagaaaagttgctcttaaaagatgtaaatagatgacaaacgatgtaaataattttgtaagaggcttcaaaatgtttatacgtggaaacacacctacatgaaaagcagaaatcggttgctgttttgcttctttttccctcttatttttgtattgtggtcatttcctatgcaaataatggagcaaacagctgtatagttgtagaattttttgagagaatgagatgtttatatattaacgacaattttttttttggaaaataaaaagtgcctaaaagatgtatgtggtgcttttcttctttacctgcaataaagagtctgatcagggcggttagtgagaaatcaattccacacatttgtagaggagccacattgaacccgtacctacataagacggggatttattttttgagacggagtctcgctctgtcacccaggctggagtgcagtggcgcaatatcggctcactgcaacctctgcctcccaggttcaagtgattatcctgtctcagcatcccgagtggttgagattacgggcgcacgtcaccacgcctggctaatttttgtatttttagtagaggtgggctttcaccatattggccaggctggtcttgtgaactgacctcgtgatccacccacctcagcctcccaaagtgctaggattacaggcgtgagccactgcgcccagctgggggatttattttttaaattagcataaagggagtcataattcacgaatacttatctggccacgtaatgcacgagaccttaagcatccttagttgaaaacaccatagagagttaacttgcatgtgctagtctggaggctgtgtcatcagaggcaaacaagaagaattggtgtaacacttaaaaaaatcattagg

SEQ ID NO: 28 - DNA, 43144 bp, Homo sapiens
ggcgtgcgccaccacgctcagctaatttttgtattttcagtagagtccgggtttcaccatgttggccaggctggtctccaactcttgacctcaagtgatccatccacctctgcctctcaaagtgctgggattacaggccggagccaccgcgcccggtccgacttttaggtttgtgaatgttttagatcagagtcctggggaagcttggtgcatgggcttgcatttgtgcgtccgtggctgtgggtccatgagcctctcaggacgtgactggcctcagtttccagagtttctgggaggctgtgttttttgtcccggctccagaggtgtccggctctgggtgtgtactgggggatggggatggggtgcgtgggcgttcacgaggttgggtgtgcccgccactccgggttctgcccgcgtctcactgcatgctcggcctgggtttccgagggtccgcgcgtcccaggctgtgcgggtggagggtgggcagggaccccgggaggccgggcggggggcgggggcgcgctgggccggccccggggcggggcgagccttcgagggctgggggcggggcggcccggccgcctcacttcggcgaagttggcggcgcggaggctggcccgggacgcgcccggagcccagggaaggagggaggaggggagggtcgcggccggccgccatggggccgggggcccgtggccgccgccgccgccgtcgcccgatgtcgccgccaccgccaccgccacccgtgcgggcgctgcccctgctgctgctgctagcggggccgggggctgcaggtgaggggccgggacctggcggatgggacgagggcggcagagggggagtgcaagaacccccaaggccggggctggcgggggttcatgggaggcaggaaccagggtcggggaaggggcgcaggagccccgggcttcatgccagtcctggaggacccagagattcagaatggggaggaccccagaggcccaaggaacagggacccttgagcgattagagctgaagatgaagggacccaggagtccgagactgggagctcgaggtgcggggatcagggactcgaggtgggggggtgcgtacagagttcgggactcgtccccatccaactcacgcctggagtcctgggtaggttatgattgggggcccaggtacttctaggccggggacctctcgcacaaaagcccccccaccccgcccccgacaccccgggcgggctgggccaggcggggggtggggagggggcgcgaagttctgggagctctgaactcggagaaaacttcccaggccggcgcgcagcaagacccggagccggattccgagccggagcctcggcggcgcgcgcgccccctcccccgcccgcagcccgcctctctcctctggccgcggggacccggaggccctgggaccccgcccctgcgcggggaggggaaggggcgagggcccacgtgctccccttcggctccagcgccccctccccgcggccagagcccctccccagccggccaggggcccccgcccctcctcctctcctccctcccctcccccgctcgggacaatggccgcgccgtctagacaccccctccctccggccggcctcgcgctttctttgccagacaaagcgggacccgcggctgggccggggagggggctgcgggggcacccccctcaccgctacgggaggcctggtgggcgggggaggggcgcgggccaaggcccctggccaggggtcccagacgccagtgtggggcttggcgctgggcggggtgggggtttcgggagtgaacggcctccccagcccagccccggggcccggacggggcaggaccaggcaggagccgccgcctccgccggaccagcggcgcacacacatggcctgtgacacactcgctggcacacatagctctaggtcacgtaacagagatgcaaacctgcacacacacagcacactcgcagacttgcacacctggctcaggaaagacacacccagctgcacgcacacagctcacacattgacatacatacacacacaaatatgatcacacaggtgtggcacacacgctgcctgcacacactcagacagcacatagatgaagactcaaggacatgcttacacccagctcacacatgcagatggacagacacagccaacccatacacagacacagcggtgcacacacaggtcacaccaacacacagctgtacacccatttacacggttcacatacacagacgcacaacagacacaacctgcatacagacagcacacacatctgtgcattcccgtatgggtgtgcagctcatacacacacgggcacacccacgctgacatgcatgtacagatagactcacatgtagctgcaactgagacacaatagatgcatgcccaaatccacatacagacacacaagcccgtgcacgcacacacatgtggctcacattgcctacagctcagggtggcccatagcccatgttatgggacccacagtgtgagttcacgaacacccacaggtcctggtgtgggtgatggtgtccagtcggcttgtcctgtgaggaaggggcatatactatgtaggcccatgctcaggttcagctcgacagattctgtaactcaccctcttgttttctatttctttctgtccttctctctctcttttttttttttgagacagtctcactctgttgccaggctggcatgcagtggcgcaatctcgggtcactgcaacctccgcttcccaggttcaagcgattctcctgcctcagcctcccgagtagctgggactacaggcgtgcgccaccacacccagctaatttttttttggagatggagtttggctcttgttgcccagggtggagtgcaatggcgtgatctcggctcactggaacctctggctcctgggttcaagcgattctcctgcctcagcctcctgagtagctaggattacaggcacctgctaccatgcccagctaagttttatatttttagaacagactgggtttcactgtgttggccaggctggtctcgaactcctgacctcaggtgatccaccagcctcggcctcccaaagtgttgggattagaggcgtgagccaccatgcctggccgctttctatttctttctgtccttctctgtcttctcctggtctatctgcttctagttcattctcacgtctttgtgtttttctcgatcttccttcctctctccatcaccctctctctgacaagagcatgcatggacacacgcactgtgtccccacacctgatcgcatgcacacagttctccactagctcagacccagccacaccctggacccttctggcaggacagttagactatgccacaccctagagggacacagcccttagggatggcgatgttggacagggcagcacatgccttgtgccagttgcccctcccttcaacacacaccctattccagcaacgcccagcgctggctgcttctggagatgctgtgctcactcgtgggtacatgccttggtccctctcccaagagcaccacgcaggcctgcctggctggagtagatgcccatcagggaaaggaagacccgtggccctaggatcccctgccccttccccttctattacccctgaacctgggcatgaagccccagacctccctgtaacactcagcacccttacttcctgtctcagcacaccccattctgcacatcttagctctggcagcttcccgagcccccacatctggcataagacagcccctcctcctgccttcccctgctttgtggttcccagggctcgagctggcagggacagctgcagcctcaacagctggggctggggcggggggggggggggcgtgggaactgtggatggggggactccctgcacccgcagagacgcccccatccccatgcagctgttgcctggtggagggagggagggggtttgtcacttgggcctggggttcctgggcacctggctgatcctccaccttccttcacccccacacagcccccccttgcctggacggaagcccgtgtgcaaatggaggtcgttgcacccagctgccctcccgggaggctgcctgcctgtgagtgcctggctcagagccaccagtgggccctgtgtgtgggggcgggggggaggggcgatttgtcttctccctctgcctctgtgttcaccatggatgtctctaccacttcctacatgtgtgtggcttgggcaacctctcgtgtttccccattggaaactgagcaggggctctgcactcttcttggcatgggttcaagtcccacatcatgttgctgaccggctaggaattaaactctttacatctcagtgtcatggtctgcaaaatgggcccagtaatcccagcttcacagttcttggccacctgaggtcacatgtaaagccccccatgaggtaggtattattcaatcaacaaactatcagggaccaatcgcagtggctcacaccctccacacccctcccatctctcaacatttagtggagggggacataggaggcctataatacagtcccacactgccacttacttgcagtgtgactttgggctagtcactttccctctctgatcatcattgcacctgtgaaatagggaatgcttcactggcgactgtgaagggacttaacaatttagttgttagatatcacaaggaaaggcaagaggttgcagggagcagagcagaggctgggaaggagctgagcagagacagaaagagctcagcttaaattctggggtctgggacaccttgagcattcaagctttttgagcctcagtttttgcatctggaaaatggggcaataataactcctgtatgcactcaacatacattaagtgctcagaatatagtatgtgctcaacataggcattattataaataataatggtagggaggcaggaaacaggtgctctaaggagaagtctctcaaggttatgaggaaatgcttggctcctttcatgctatcattaataacagcagttcacgcagtagccattgattgactcattaatgtattcatttattcagcatcatgtgtgccaagtactgggtcaggcccaagctgggtgggtctggggtgattttagaccaagaagagccgctttgaagttacacctacatttattttggctggatctcccactcgggctcacctttgtggagggctgagcctgactgagagggtttcctggggctggggggtctgcgaaggtggggcgggatggggaaaagtgtgaccttacctggagccacacacctgggagggcgagcggtggggccgggcgcctgcgcagtggagctccgcgcctggaatactgccgacaggtgaatgagcccgcggctgccccgcccttcgacaggtgaatcaccggcgcgcgcggcgcccggagcccggatcgcccggagtggagcgggctcagtcctccgagttgggctgtgggaaccactccctacacgccctccaccccccacgagtctctttcacggtctcaaatactcaagtcctttcaaggatgcccccaagctgtcaccccacccatggatcccccaagacccccccaccggcagcagacgtttccatagacctcgtccccatctcctagtcctcgcctcacccgccgtgccccccctaactaggtctgcgctcccccctccgtctcccccaaagcttaggccgtggggcggggcgcgggctggggctggaaccggcccgaccggtcggcgggggcgcgggacgcagagcgtgggaacccgcccggggcgtcgggagggggcccgcgcgggtcgcgccctgcctggcggtgggaccagctatcctcggcgcccagcgcagcgcgccccctcccgacgcgcggtcggggccgcagtggtcgccctgcgggccttggaggaggggacgggagctgtgccctcccctcccaacgccacccgcacccttgcttgctcggccgtgccccgacctgtttcgctgggggccggggtgggggggatcttgcgggtgacgctaaggactgagtcagccgcttgttgagttcagtctcaggcgtctgggacaagccggagggaggacaaccgcgccaggggcggagggtggggggatagaggggggtgagggttggcagcgtcggggggcggagcttggactctctggcttctctaagcccctccctctgaccccgctagtgccccttggagatttccagtcttaagaccaacccctcccagttccaattcctcacactccttggtgggcttggggagggggctgcaggttgaaggaccacccccccaagatgagggtaccaacagtggtgtcagtaccccaaccctccaccctcccatccctgcataagaggctatataagtcccagagaagggacttgagggtttgtgggagccctgctgtctgtccctgtgagtgagagttgctcatttccgcgtgggatgctgtgggttggtgtcttgagtgctggccaggccatggcgtccaattggtgtgtccctctgtgtgtgtagctgtggtttctgggcctgtctgtgtgtgcctgcgtggttgtgtcctggggtctgagacttctttttttccttttcctttttttttttttttttgagatcgagtatcgctcttgttgcccaggctggagtgcagtggctcgatcttggctcactgcagcctctatctcctgggttcaagcgattttcctgcctcagcctccggagtagctgggattacaggcatgtgccaccacacttggctgattttttgtgtttttagtagagacggagtttcttcatgttggtcaggctggtctcgaactcttgatgtcaggtgatctacctgcctcggtctcccaaagtgttgggattacaggcgtgagccaccgcgcttggacatgggtctgagacttttcatttgctgttccctctgcctggaatgccgttccccagaaagccccatggccccctccttaccttcatatgtctgtgaaaatagaattccacctccttgaccccatcattctatcccccttaaccctgtggtttagcttcctacggctgctctaacaaattaccataaactgggtagcttgaacaatagtaatttattctcttgaagttctggaggttggaagtctgaaatcaagatatcggcagggctgagcctctccatggggacccaggggagaactgactcttgcagcttctggtggctccagacgtttctcagctagtggctgtctcactccagtccctgtctctgtcttcttctcttccttctcccacccaaatctccttttggctgcctctctctttttttgagacagagtcttgctctgtcacccaggctggagtgcagtggtgcaatcttagttcactgcagccttcaactcccaggctgaagcgatcctcccacctcagcctcccaagaagctgggactacaggtgtgagccaccacggccagctaatcttttatttttattttttaggtggagtctctctctgtcacccaggctggagtgcagtggcacgatctcggcttactgcaacctccgcctcccaggttcaagcaattcttctgtctcagcctcctgagtagcggggactacacgagtgcaccaccacgcccagctaatttttgtatttttagtagcgacgaggtttcaccatattggccaggctggtcttgaactcctgacctcgtgatccgcccacctcagtctcccagagtgctgggattacaggcatgagccactgcgcctggcctgtttgttttttttgttttttgtttttttttgagatggagtctccctctgtcaaccaggctggagtgcagtggtgcaatttcggctcactgcaacctccgcctcctgggttcaagcgattctcctgcctcagcctccagagtagctgggattacaggctcctgccaccatgcccggttataatttttaatttttttttgtggaaaaaaagtctccctatgttgctcaagctgatcttgaacttctggcttgaagtgattatcctgtcttgacctcccaaagtgttgggattacagttgtgagccgttctcttgtatgaacacttgtcactgaatttagggcccaggtggataattcagaataatctcatcttgacatctctcatttaattacatctgcatagccaggcctggtggcgtgtgcctgtactcccagctacgcaggaggctgagacaaagaattgcttgaaccccgggaggtggaggttgcagtgagccaagatcgcgccactgcactgcagcctgggtgacagagcaagactccgtctcttaaaaaaaaaaaattacatctgcaaagagccatttaaaaaaaaagtaaggtcctagtcacaggttctgggacatggatgtcatcttttcaggggctgtgacccaactgactacatccttcatggttctgatggctttcaccgccccctgccagcatgttgtatattaatttgttattcgtatatgttctccttgcctggacctggctgcaaggatccagagggatagggacccctttcattgtgtttgttgctgtatttgtattgctcagaacgtagtaggtactcagtaaatattcgttgcatgaatgaatgtgtgttttgttttgttttgtttctttgagaccgagtcttactctgtcacccaggctgcagtgcagtggcgcgatcttggctcactgcaacctccacctcccgagttcaagcaattctcctgcctcagcctcttgagtagctgggactacaggcacgcaccactatgcccagcaaagtttcgtacttttagtagagacggggttacaccatgttggctaggctggtcttgaactcctgaccccaagtgatctgcccgccgcagcctcccaaagttctgggattacaggcgtgagccactgctcccagcaaatgtgtgtttgctgctctgtttccctgcgtgtttcttgcctgtcttgtgtgtatctttgtgtctggggccatcctgccctgtgctgcccaaccaagccatctctgcccacaggtgcccgcctggctgggtgggtgagcggtgtcagctggaggacccctgtcactcaggcccctgtgctggccgtggtgtctgccagagttcagtggtggctggcaccgcccgattctcatgccggtgcccccgtggcttccgaggtgagaggggaagagtctggaggggaggtagtcgggggtgtggtcagtcctaaactcaccctgtcctggtccctccaggccctgactgctccctgccagatccctgcctcagcagcccttgtgcccacggtgcccgctgctcagtggggcccgatggacgcttcctctgctcctgcccacctggctaccagggccgcagctgccgaagcgacgtggatgagtgccgggtgggtgagccctgccgccatggtggcacctgcctcaacacacctggctccttccgctgccagtgtccagctggctacacagggccactatgtgagaaccccgcggtgccctgtgcaccctcaccatgccgtaacgggggcacctgcaggcagagtggcgacctcacttacgactgtgcctgtcttcctggtgagtgagccctactcaggagagtcagaggggtgggcgtggggacagcaggccagcccggcggtgaccatccttgcccccttccctgctagggtttgagggtcagaattgtgaagtgaacgtggacgactgtccaggacaccgatgtctcaatggggggacatgcgtggatggcgtcaacacctataactgccagtgccctcctgagtggacaggtgggcactgcggccagagggagcggggaggcaggcctcgggtggacatgcgccaggtggctggactgctgcatctgtgtgccacaggccagttctgcacggaggacgtggatgagtgtcagctgcagcccaacgcctgccacaatgggggtacctgcttcaacacgctgggtggccacagctgcgtgtgtgtcaatggctggacaggcgagagctgcagtcagaatatcgatgactgtgccacagccgtgtgcttccatggggccacctgccatgaccgcgtggcttctttctactgtgcctgccccatgggcaagactggtgagtggccgttttctctgcagggagccatggatggtttttagtgagggcaaataagaagtctgacttgagtgttagaaagattatgctaggctgggcacagtggctcatgcctgtaatcatagcactttgggaggcccaggcgggcggatcactggggtcaggagtttgagaccagcctggtcaatatggtgaaaccccatctctactaaaaacacaaaaattagctgcgcgtggtggtgcacacctgtaatccaagtctctcaggaggctaaggcacgagagtagcttgaacccaggaggtggagattgcagtgagccaagattgcaccactgcactctagcctgggtgacagagtgagactccttctcaaatttaaaaaataaaaaaaagattatgctaggccgggcacagtggctcatgcctgtaatcccagcactttgggaggccaagatgggaggatcgcttgggcccaggactttgagaccagcctggacaacatagtgagtttttgtcatctctacaaaaacttggtaggctgggtgtggtggctcacgcctgtaaccccaacacattgggaggcccaggcgggtagattgcttgagctcagcagtttgagaccagcctgggcaacatggcaaaaccctatctctaccaaaaatacaaaaaattagctgggcatggtagcgcatgcctgtagtcccagctactctggatgctaaggttgaaggatggcttgagcccagaaggtggaggttgcagtgagctgagactgagccactgcgttccagcctgggagacagtgtaagaccgtgtataacaaaaaagagagagaaaaaaagatgatgctggaggcagctttagtggggaagtgtaagcctgggagaggcttgggaggaggctgacattgcactgatgcatggctcagggcagaagccattggaatggggaactcctgggagttacctttggaagtggcaaagatcagagaacatgtttaggaggggaacgtggatatagaaagagggcatacatggcagagggtattacagaagcaaaggctggagtgtaggacccttttgtaatcagaagagtcaaaaggttttaaaacaatatgtggatgtttgcaatttattttattttatttttgagacagagtctcactttgtcacccaggctggagtacagtggcatgatctcagctcactgcagcctcgacttcctgggctcaagtgatcctcccacctcagtcccccaagtagctgggattacaggcgtgcgccaccatgcccggctaagctttgtattttttgtagagacgggtctcactatattgcccaggctggtcttgaactcttgaactcaagcgatgcactcaccttggcctcccaaagtgctaggattatagacgtgagccactgtgcccggtctgcaatttatttttaaatggtttagaaaagaagattggtagattaagctaacaatagttgaatctaggtggtgggtatatgaatggtcaacttttctgtatgtttgatagttctcataataaatggattaaaaaagcagctactaaatactgtttaggtttaataaaaacaacaggccgggcgcggtggctcacgcctgtaatcccagcactttgggaggctgaggcaggcagatcacctgaggtcaggagtttgagaccaacctggctaacttggtgaaaccccgtttctactaaaaatacaaaaaattagccgggcgtggtggcacatgcctgtaatcccagctactcgggaggctgagcaggagaatcgcttgaacctgggaggtggaggttacagtgagccaagatcgcgctattgtactccagcttgggcaacaagagcgaaacttcgtctcaaaaaacaaaacaaaacaacaacaacgacaaaacaatactcaaggggtgtgggccttttgggcagagcaggaagatctgcctatgacttctgcttaccacttcccaggcctcctgtgtcacctggatgacgcctgtgtcagcaacccctgccacgaggatgctatctgtgacacaaatccggtgaacggccgggccatttgcacctgtcctcccggcttcacgggtggggcatgtgaccaggatgtggacgagtgctctatcggtgaggggagctccatcgtctgtgaatgggctgggaaagaggggagaggagggggtcccggccagccacgcccacaccgatcgcactccatccggcaggcgccaacccctgcgagcacttgggcaggtgcgtgaacacgcagggctccttcctgtgccagtgcggtcgtggctacactggacctcgctgtgagaccgatgtcaacgagtgtctgtcggggccctgccgaaaccaggccacgtgcctcgaccgcataggccagttcacctgtatctgtatggcaggtgggtggtgggcgtggcctgggcgggtcctgaggcagggggcggggacagagaagcccgcggatggggagctgagcagaatggggtgtaagtgggtttggagtgggacccttagagactgaagcctggaaggaggtggggtcaggaccagaagggaatactgtgtgattctgggggcttggtcaaatggagtcagtagaacctcaggtgggctgggagtattcttggccttaggacccactcgggaaggggttggggatagagaggcagagtcggggctgctgtgaggtcaaggtgaagcctgcagacaagcttgcagtaagcctgggcaaaggctatggggggccctggggctgggggctggggactggggaaagggcttagtctgaggactggggagaggaggaggggtttgaaggcaaggcctctgcggacacccatgagccttgggccagttgggaccacggctgggtgacagtccagcctgtggctgaaaattaaggttgggctgggagtgtagaggtggggacgaaggctcgggggatttgtcgatgagtaggaagggaagtacctccttccttgcaccccgttcacaccatagggtagcccccgctttcctaagccctattccctgccccaggcttcacaggaacctattgcgaggtggacattgacgagtgtcagagtagcccctgtgtcaacggtggggtctgcaaggaccgagtcaatggcttcagctgcacctgcccctcgggtgaggacctcaggagagggagcccgaaaagacatgtctgggaaggggcaaaaactccagggtgggaacctgtaaaaccacgttagcggataacttacaatagaaaccatatgttatgaaacattgaagttaatttaaatccaagtaaatgggtttttccacccaaacaaggcggggctggagaggggtgtactgctctcaccctttctgggcctctgctcatcccactccccaccccaggcttcagcggctccacgtgtcagctggacgtggacgaatgcgccagcacgccctgcaggaatggcgccaaatgcgtggaccagcccgatggctacgagtgccgctgtgccgagggtgaggcgggccaatgacagtccgacaagaatcaggaggcggggcttgtgggcgacagggccaataacagacttggggagagcttgggggcggggttgtagcaaggcaggacccagtgacagagttggggggtggagccaataatgcatatagactgacataaggctacgtgtggagccaaagtgttgggctgggcacagggtgcctgtaactgaatggggagggcccaataccttcccctggcacctgccatgtgctcccatctccagtggagggtggggcagaaacagggctggaggtggggccacagctgggggcgggatttaactgtgggagagtcttggctagggacaaattctggagcttgtagtggggtggagtggaagtaagtggggggtggggggtggggcctgtattgagctcgcctcctgacagcttgatgggcagggcctcagatagagctgaaccaggattggtccgaggcctcacttgtgggcaggcccctggcaagtgggcggagcctgaccctcttggccccacaggctttgagggcacgctgtgtgatcgcaacgtggacgactgctcccctgacccatgccaccatggtcgctgcgtggatggcatcgccagcttctcatgtgcctgtgctcctggctacacgggcacacgctgcgagagccaggtggacgaatgccgcagccagccctgccgccatggcggcaaatgcctagacctggtggacaagtacctctgccgctgcccttctgggaccacaggtgggaccgggggctggggcagaaacagcacacctggaggggcacagagggtttgggaatggtgcatctagtggggcacagtggtggccactccatgccatgttcctggcccctaggtgtgaactgcgaagtgaacattgacgactgtgccagcaacccctgcacctttggagtctgccgtgatggcatcaaccgctacgactgtgtctgccaacctggcttcacaggtgggcaagtggctgccatgagagggggtccttagatcgagggtgaagtcactcgtctctgtgggcctgttttgcccgtatctttgcagactcttgtccaacgaggttgtccgtgctttgccctgagtctgtgctgtctcattggcataaggttgtttcgagattattctgcaggctgggcgcggtggctcacgcctgtaatcccagcgctctgggaggccaaggcaagtggatcacttgaggtcaggagttcgagaccagcgtggccaacgttgcgaagccccatctctactaaaaatacaaaaattagtcgggtgtggtggtgggcgcctgtagtcctagctactcgggaggctgaggcaggagaattgcttgacctcaggaggcggaggcggcagtgagccaagattgtgccactgtactccagtctgggcgacagagtgagacttcatttcaaacacacacacacacacacacacacacacacacacacacacatacaaaaacaaacaaaaagattattctggaacatagatgaaagtgtccaaactcagtgactaggttatttctgaatgggtctaaactaatccttagtggaaatgaatgtgactttgctaggtgtgttggctcatgtctgtaatcccccagcactttgggaggctgagacatgaggatcacttgagcccaggagttcgagactagcctgggcaacataatgaaaccctgtctctacaaaaaataaacacactcccaaagccagattagtcaatacgtagataaacacgcacacacatgcacacacaattagccagacgtggtggtgcgcaactgtagtcccagccactcgggaggctgaggtgggagaatcgcttgagcccaggaagtggaggctgtggtgagctatgatcatgccactgcagtccagcccgggcgacagagtgagaccccatctcaaaaaataagaagaagaagaaaagaaaaagaaagggacttcatggaagtttggggaccagaatgatctggggcaagtcagctcttggttgaggaggcgggtgtcctaatctgcacaagagctgatgcgttatgaaaaagaggtcattgctcgggggtgtgggtgtgctaagtggggtcacgtcgtccctccctggttgtccctgctgactttgttctgagatgagattgcttgtgtactccccagggcccctttgtaacgtggagatcaatgagtgtgcttccagcccatgcggcgagggaggttcctgtgtggatggggaaaatggcttccgctgcctctgcccgcctggctccttgcccccactctgcctccccccgagccatccctgtgcccatgagccctgcagtcacggcatctgctatgatgcacctggcgggtgagggcccttctcagcctcagacactgccccctctccctggcccacctccctggcctgactaccttcccctgccaggttccgctgtgtgtgtgagcctggctggagtggcccccgctgcagccagagcctggcccgagacgcctgtgagtcccagccgtgcagggccggtgggacatgcagcagcgatggaatgggtttccactgcacctgcccgcctggtgtccagggtgtgtacctcaccttccctctgcagccccaccaacaccatgggccttctcatctctcttctcctctactctctcctcccgctatgttagcttcttttttgctttcaatcatttccctccaggagcttgggaggtgggtatcaaggtggggaccctggggttgggggaggtggggggagatgggatcagggagtccctcaaggctatctctgcttccctctcttccacccccaacaggacgtcagtgtgaactcctctccccctgcaccccgaacccctgtgagcatgggggccgctgcgagtctgcccctggccagctgcctgtctgctcctgcccccagggctggcaaggtatgccacctgcttctcttccctcctcctctccatctcctctgccccctaccctatcagggatgatgctggggatccagagagggacccatccccagccctgcctttgagaggggcttccttcttggaaggacagagctggacactgatatgcagcctgtgtgggtcagcccttggaagaggaagagttatggggctagagatgctgggacttagggcggggtttagggtacagcttcctggaggagcagacctcatagtaggtatttgccacctactgagacagggagacggccattctgaaactgcatatgcaaaatgcccagacacgaatgacagcacggcttattttgccttcacccatctcggcctgcaggttcttcctgagccccaggtccctgagaccctgctctgtaccctgtaaccctaggtgtaaccttgctccctacccccaggcccacgatgccagcaggatgtggacgagtgtgctggccccgcaccctgtggccctcatggtatctgcaccaacctggcagggagtttcagctgcacctgccatggagggtacactggcccttcctgcgatcaggacatcaatgactgtgaccccagtgagtgcaggggagctcttgggggtgctgctctggggaacacagtcattaagcttgaactgtgtgcctggcactgtgctgtcatttcatcttcacagttatcttacttttcccgttttatttatatggaaactgaggcccgaggaggttgagtgacttcttgtgcaagcccatggaacgagttagggaatgagctgggcttagaaccttggagtctgtgtgctgcctcttttttttttttttttttttttttttttgagacagagtcttagctctgtcgctggagtgcagtgttgcaatcatcgctcactgcaacctctgccttctgggctcaagcacctcagcctccccagtggctgcgactataggcgcacaccacagcgcccagctaatattttgtgttttttgtagagacggagtttcgccatgttgcccacggtggtctccaattcctgggctcaagcaatctacctgtctccacctcccaaagtgctgggattacaggcgtgagcaaccacacccgacctaagtgcactgtctttgagagcaatcgagttaatatcatgtgcaaagtatgagataaaaggccccccagaggccgggcgaggtggctcacacctgtaatctcagcactttgggaggccaaggtgggcggatcacctgaggtcaggagtttgagaccagcctggccaacatggagaaaccccatctctactaaaaatacaaaattagcagggcatggtggcgcatgcctgtaatcccagctacttgggaggctgaggcaggagaatcacttgaaccttggaggtggagattacggtgagctgagattgtgtcattgtactgcagcctgggcaacaaggcataactccgtctcaaaaacgaacaaacaaacaaacaaacaaacaaaaaggggtgctgccaaacagataaataacacaagccacatatgcaattttaaattttctagtagccacattaaaaaataaacagaaatgggagatattaaatttaatattttatatttatttatttattatgtattcagagtgaggctctgtcgcccaggctggagtgcagtggtgcgatcttggctcagtgcagtctcgaactcctgggctgaggcattcctcctgtcttaacctcctgagtagctaggattacaggcactcactacatgcctagctaatatttttattttaattctgtagagatggggtctcactgcgttgtctaggctggtctcaaactcctggcctcaagccatcctcctgccttggactctcagactgctgccactgtgcctgaccaaatttaatatatttaaatttaatttattgaatgtatataatcggctgggcgcagtggctcacaccggtaatcccagcactttgggaggctgaggcaggtggatcacctgaggtcagaagtttgagaccagcctgaccaacatggagaagccccgtctctactaaaaacacaaaattagctgggcgtggtggcacatgcctgtaatctcagctactcaggaggctgaggtaggagaatcacttgaacccgggaggcggaggttgtggtgagctgagatcgtgccattgcactccagcctgggcaacaagagcgaaaccccatctcaaaaaaaataaaaataaaaataaaagtaaataaataaataaataaataaatgtatataatctatttaacccaatatattaacatatcatttcaacatgtaaccagtataaaattgttaatgagatattttacattgtttccttttttttttttgagacaagttctcactctgtcgcccagactggagtgcagtggtgcgatcatgactcactgcagccttgacctcccaggctcaagtgatcctcccgtctcagcctccccactagctgggactacaggtgtgcaccatcatgcccagctaatttttgtattttttatagaaatggggtcttgccatgttgcccaggttggtctcgaactcctgagctcaagtgatctgcccacctcggcctcccaaagtgctgggattacaagtgtgtgccaccacgcccagcctattttttttttcataccaagtcttcaaaatctgaaacccagtatgtattttacatttatagcacatctccatttagtcacaatttcaaggactcagtagccacatgtggctaatggccactgtccttgtcctgttccaagcacaggaattagatcaggcacaattagcagcgtttgcttggcagcttaaagggaccttttggttttcccaacatcctgcccttgccacataggtgaggtttccagataaaggaggggacgaggccacagaaggggatggatttagattcctctgaccaaatgcaccccatcccagttgaacctggtttcctcctgaattcttctcaatccaaggcatatcccagtcagactgggctaatgggggcaaggtaggtgaccagaccgccttcctcctgtccgcagacccatgcctgaacggtggctcgtgccaagacggcgtgggctccttttcctgctcctgcctccctggtttcgccggcccacgatgcgcccgcgatgtggatgagtgcctgagcaacccctgcggcccgggcacctgtaccgaccacgtggcctccttcacctgcacctgcccgccaggctacggaggcttccactgcgaacaggacctgcccgactgcagccccaggtgggcggggcctctgcttggagagcagggactctggcttgggatggggcctgggacctgggacgaagtggggacagcaacgacttgggggagtcctcagcttggtacccactgcggactctgatgactgatggggcagggccagggaaggagcagggcgtctgtttggagctcaccttggagtctctggtgcctgagagggcatggcttccaggtggctctcaccttagggctgaagtccctggtgaattggagctaagggacctgattggcttctgctggggctgcagcttcttgccgagataagggtcagggagtgggacgtccccagcgctaacagcgggactcaggaaggagggcagggcctgtgagggggcggagcctgatcctccctcccactccttccgctccagctcctgcttcaatggcgggacctgtgtggacggcgtgaactcgttcagctgcctgtgccgtcccggctacacaggagcccactgccaacatgaggcagacccctgcctctcgcggccctgcctacacgggggcgtctgcagcgccgcccaccctggcttccgctgcacctgcctcgagagcttcacgggcccgcagtgccaggtgggtggagttactggggacctgggggaggagcctgcctgggatcctaggagggagaagccaagtcggggcacagtttctcccagactaccccccaccccacagtactgactctgagtgcttcccctccagacgctggtggattggtgcagccgccagccttgtcaaaacgggggtcgctgcgtccagactggggcctattgcctttgtccccctggatggagcggacgcctctgtgacatccgaagcttgccctgcagggaggccgcagcccagatcggtgagtgggagcatgtgggcgggcgtgtggggccttgggaaggggctcatgcacgtacctcctgctagtgtgagccgaatgggggtgccacagagcctatggggcatgatggggtgtgtggctgagtggtgtgggtgtgtgagcatgtgacaactggccgggatggtgtgtgtctgtcactgtgagacagcagggatggtgtgtgtgctacagggtgtgaccgagctgctgtgagcgttgaaggcatgtgtgtgtatgtcagtgatgagaccttgcctgctggggggatgtgtgacaacctgatggagtgtgggtgcgatcctggggactcattccaccaaggatgttgaatgatctgtgtgatggaggcagaagggggatgtatggggttacctctgttcctgtgccactctcctctttgcaggggtgcggctggagcagctgtgtcaggcgggtgggcagtgtgtggatgaagacagctcccactactgcgtgtgcccagagggccgtactggtagccactgtgagcaggaggtggacccctgcttggcccagccctgccagcatggggggacctgccgtggctatatggggggctacatgtgtgaggtaagggggcgctccccaggagagggaagaggaggtgggcatgcttgggtgcgtctgggcacacatttctgtgtggcttggtatgggtatgtctctagatatgtctgagtttttgcttttgtgactcttggtgtatctgtgggtgtcactctgggtagatctggggtgtttttttatttgtttgtttttttgagacaggttctcactctgtcacccagacgagtgcagtggcgcgatctcagctcactgcaacctttgcctcctgggttcaggtgattcttctgcttcagcctctcattatagctgggagtacaggcacccaccaccacgcccagctaatttttgtatttttcatagtgacagggtttcaccatgttggccaggctggtctcgaactcctgatctcaggtgatctgcccacctcggcctcccaaagtgctgggattacctactggtagtgcgctgaacatctgtgtgtgtccttttgtgctggggttctttgcgtcttcatgggtatgtccaggtgggtctgtgtcccactaagctgagtgggtccctctcttaccccactgaagtgtcttcctggctacaatggtgataactgtgaggacgacgtggacgagtgtgcctcccagccctgccagcacgggggttcatgcattgacctcgtggcccgctatctctgctcctgtcccccaggaacgctgggtatgccagggccagggttggggggacaggatgagaggctgtcttcattccctcttgaccacccctcgtttcttcccccaggggtgctctgcgagattaatgaggatgactgcggcccaggcccaccgctggactcagggccccggtgcctacacaatggcacctgcgtggacctggtgggtggtttccgctgcacctgtcccccaggatacactggtttgcgctgcgaggcagacatcaatgagtgtcgctcaggtgcctgccacgcggcacacacccgggactgcctgcaggacccaggcggaggtttccgttgcctttgtcatgctggcttctcaggtaagcgttggcgaaggggctggcctgggaccccgcctgtcattcccccattgtggctgatctacatgctcccgctcgctcaggtcctcgctgtcagactgtcctgtctccctgcgagtcccagccatgccagcatggaggccagtgccgtcctagcccgggtcctgggggtgggctgaccttcacctgtcactgtgcccaggtaggtgtgggtggcggcctttggaggaggagtaggggcgtggcctctggagtagtaggggcgtggcgtctaggaggaggatgtggctttaggggagacatcgaagggaagggagtttctggaaaatgctgacatttccgccgggtgtggtagctcacacctgtaatcccagcacattgggaggccgaggcgggaggatcacttgaggccaggagttagagaccagcctgggcaacatggtgaaaccccgtctctactaaaaatataaaaattagccgggcgtagtggcagctgcctgtaatcccagctactcgggaggctgaggcaggagaatcacttgaacccgggaggcggaggttgcagtgagccatcacgccattgcactccagcctggcgactgagtgacactccgtctcaaaaaacaaagaaacaaccccctgccccgacatttcctggaggtttgaagggaaaagggtgaggatggtgattggggggcgtggcctcctgggatggcagggcttatctgccaggtggggtctccagtgtggaaaggggagcggttgggtgggacatggggaggttgagggggtctcaaccttccttagtcttgacctcttctcttccccctctctccccttgactcttcttttccccactcctccatttcttctcctccttccctccactccccaccctcatttttatccctccctccccaaacccgacccccagccgttctggggtccgcgttgcgagcgggtggcgcgctcctgccgggagctgcagtgcccggtgggcgtcccatgccagcagacgccccgcgggccgcgctgcgcctgccccccagggttgtcgggaccctcctgccgcagcttcccggggtcgccgccgggggccagcaacgccagctgcgcggccgccccctgtctccacgggggctcctgccgccccgcgccgctcgcgcccttcttccgctgcgcttgcgcgcagggctggaccgggccgcgctgcgaggcgcccgccgcggcacccgaggtctcggaggagccgcggtgcccgcgcgccgcctgccaggccaagcgcggggaccagcgctgcgaccgcgagtgcaacagcccaggctgcggctgggacggcggcgactgctcgctgagcgtgggcgacccctggcggcaatgcgaggcgctgcagtgctggcgcctcttcaacaacagccgctgcgaccccgcctgcagctcgcccgcctgcctctacgacaacttcgactgccacgccggtggccgcgagcgcacttgcaagtgagcccatccacccgatcgatccgtctgtctatgcatccatcccagtctgtttgtccgtgggccctgcctctctttccacctgcccatccacttgccccgtctgtttctctgtgcactctatctgcccatcggtgtgtcccacgtgtctgtccgtgtgtctgttcatccatgtgctctgtctatcttgttcttgtttctatctgcctatgcacttctctgccccgtttgtctgcccttttctccatccaataattacttttttttttttttcccgagatggagtcttgctctgtggcccaggctagagtgcagtggcgcgatctcggctcactgcaacctctgcctcccgggtttaagcagtactcctgcctcagcctctggagtagctgggattacaggtgtgagccaccgtgcccagccgaattcctttttttttttttttttttttttaagacggagtctcgctctcttgcccagactggagtgcaatggctccatcttggctcactgcaacctccgcctcccgggttcaagcgattctcctgcctcagccttccgagtagctgggactacaggtacctgccaccacgcctggctttttttttgtatttttagtagagacagggtttcaccatattggccaggctgctcacgaactcctgaccttgtgatccgcccgccttggcctcccaaagtgctgggattacaggtgtgagccaccgcacctggctccttttttttttttttttttttttttttaagacagggtcttgctctgtggcccaggctggagtgcagtggtgtgatcttggctcagtgcaatctctacctcctgggctcaagtaaccctcacacctcagcctccctaggagctgggaccacaggtgtgagccaccgcgcccgggtaacttttgtgctttttcttagagatggggtttcgccatgttgtccaggctagtcttgaacacctgagctcaaagcaatccacccagcttagcctctcaaagtgctgggattgtgggcctgagccaccacatctagcctaaaaattccttttattggccgggcacagtgctcacgcctgtaatcccagtactttgggaggcagaggagggcagatcacctgaggtcaggagtttgagcttgggcaacatggtgaaactccgtctctactaaaaatacaaaattagccgggtgtggtggcacatggctgtaatcccagctactcaggaggctgaggcaggagaattgcttgaacctgggaggtggaggatgaggtgagctgagatcgtgccattgcactccagcctgggcagcaagagtaaatctctgtctcaccaaaaaaaaaaaaaaaaaaaaaaattgcttttgttcctctgtgtacccaactgtcttcctccactcctgtttgtccatccttgggccgaatctgtccatccatgcactctttttgctcctctatatggctatctgtgggtgcccctgactatctctgcccctcttctgcccctctctctgtctgtcctaggcagtccatctgtccatccctacaccctgccccttctgtcctctgcgtacctctctgtctgcttggaaccctccacccccttaatctccacatcctcatcttctctgctttcccctcactcactctgttccagccaccctggcctctctgctgtttcccagataccccaggcttgatcccatatcagggcctttgcacaagctgttcctactgcctggctgttcccttcccccacatggctcctccctcacctccttcaagtctttgctgaaatggtggtaccttctcagtgagcacctccctggtcacccccagcccttcctctgctttatttttctgcttagcatttaattccatccagcactatgtgtgtgcgtgcgtgtgtgtgtgtgtgtgtgtgtgtatatacatatatatacatatatatatatatatatgtattttttttttttttttttttagacaggatttctctcccattgcccaggctggagtgcagtggtgtgatcttggctcactgcaacctccacctcctgggttcaagctattctcctgcctcagcttcccgagtagctgggattacaggcgcccgccaccatgcctgactaatttttgtatttttagtagagacgggggtttcaccattttggccaggctggcctagaactcctgacctcaggttatccgtacaccttggcctcccaaagtgctggaattagaggcatgagccaccgcacccagcctgtatttttattttattgatgagtaatggagatgctgtatatttggctcatgtatctcccttactatctgtcttcacccagtggaatgccagctgcacgtggaccaggaattgtggccgggccttatccttgtgcctgcagcagtgcccaacacatggtagtcagttagtatttactgattaattaatagttagccagtgaggccgggagtgtggtgtgggtttgtagtcctagctacttgggaggctgaagagggaggataatttgagtccaggagtttgagattgcagagagctatgattgcaccactgcactccggcgtgggcaacagagcaagaccccatttcaatcaatcaatttaaaaaaatattatcaagggctgcgtgcggtgacttatgcctgtgatcccagcactttgggaggccgaggcaggtggatcacctgaggtcaggagttcaacagcagcctggccaacatagtaaaaccccgtctctgctaaaaatacaaaaattagacgggcgtggtggtgcatgcctgtaatcccagctacttgggaggctgaggcgggagaatcgctggaaccggggaggtggaggctgcagtgagctgagagatcatgctactgcattccggcctgggcgacagagcaagactccgtctcaaaaaaaaaaaaaaaaaattatccagtgaatggcaagatttgcagaaagcctggcatgggtccgtatattccagtcccctgtgcaagccttgtctggagtctctgtactctacggtgtgaatgcatggaaggggattgtctcctctgacccctgactccgcccctctctgcctcacccttccccaccagcccggtgtacgagaagtactgcgccgaccactttgccgacggccgctgcgaccagggctgcaacacggaggagtgcggctgggatgggctggattgtgccagcgaggtgccggccctgctggcccgcggcgtgctggtgctcacagtgctgctgccgccagaggagctactgcgttccagcgccgactttctgcagcggctcagcgccatcctgcgcacctcgctgcgcttccgcctggacgcgcacggccaggccatggtcttcccttaccaccggcctagtcctggctccgaaccccgggcccgtcgggagctggcccccgaggtgatcgggtgagtgaccccacctggaaaagccgtggtggctggggagaggagagatgctgttgatccaggtcttgtgtgtttcatttcacttaatgcctttacccaccagatgtcaggagcaccgcctcctggctgtgacaagcaaaaaatgcctccagatggagctagtgcttctggggtagaattgcccaggtctagtgctggcttgtggggaggcaggttgctaagtggcttggcagagtggttaaatacatgtgtagggtttttttcttcttcttcttcttcttctccttctccttctccttctccttctccttctccttcttcttttctttttttttttttttttgagacggagtctctgtcgcccaggctggagtgcagtggcgtgatctcagctcactgcaacctctgcctcctgggttcaagcaattctctgcctcagcctccagagtagctgggattacaggcatccaccaccacaccgggctaattttcttcttcttaaagacatagaagataaagccgggcacaatatattcttgtagtcccagctacttggaggatcacttgagcccaggaattcaaatctagcctgggcaacatagcaagactcccatctctctctctctttttttttttttttttttttgagacggagtctcgctctgtcgcccaggctagagtgcagaggcgcgatctcggctttctgcaagctccgcctcccgggttcatgccattctcctgcctcagcctcccgagtagctgggactacaggcggccgccaccatgcctggctaattttttgtatttttagtaagagacggggtttcagtgtgttagccaggatggtctggatctcctgacttcgtgatccacctgcctcggcctcccaaagtgctgggattacaggcgtgagccaccatgcccggcctccgatctcttaaaaaaaaaaaaaaaaaaaaaaaagaagaagaagaagaagaagaagaagaagaagaagaagaagaagaagaagagggaggagggagggggagggggagggggaggaagaggaagaagaaggaagagggggagggggaggaggaggaggaagaggaagaagaagaaagaaataggaggggctcggtggctcacgcctgtaatcccagcactttggaaggcagttcatttgacgtcaggagtttgagaccagcctgggcaacatggcaaaaccctgtctctactaaaaatacaaaaaattagccaggcgtggtggtgtatgcctttagtcccagctactcaggaggctgaggcatgagaatcacttgaactcaggaagtgaaggttgcagtgagccaagattgtgctactgcactccagccggggcaacagagccagactctgtctcaaaaaaaaaaaaaaagaaaaagaaaaaatatagaagtatcctgctagtggcctggtagaggtaccagaagggaggtgtagctattgttgaggagaaggcagagacctgagaggggtgggtctctgatacagagaggagggttgggttttgcagatattgggatgtgggtggtggaaggggaggggtagagggatgaaggagagtggttggtgtaccagcccctggctaagctgagtgatagggccacaaagtgaaaaacaggtcattttggagcttgcagagtctgagggacctggaagtattgggaaggcctccaaggagatacctgggggctaaagacacaaacaagaaagatataaaagtgttgatgatcattgaagccatgagagggactcaaaggagtggggagagaaggaacagaagaattaatctggggacacggagacctaaggattggatgaatggaattagctcaaaaaagaggaagaggccaggtgtgatggctcacaactgtgatcccagcactttgggaggttgaggcgggtggatcacctgaggtcgggagttcaagaccagcctgaccaacatggagaaaccctgtgtatactaaaaatacaaaattactggggcgtggtggcgcatgcctgtaatcccagctactcaggaggctgaggcaggagaattgcctgaaccctggacgtggaggttgtggcgagctgagatagcaccattgcactccagcctgggcaacaagagtgaaactctgtctcaaaacaagcaaacaaacaaacaaatacaatgtcctggccaacacggtgaaaccccgtctctactaaaaatacaaaaattacctgggcgtggcagcgcgtgcctgtaatcccagctactcaggaggctgaggcagagaatcacttgaaccagggagtcggaggttgcagtgagctgagattgcaccactgcactccagcctgtcgacagagcaagacttcatctcaaaaacaaaaaacaaacaatgtcccttggctgggcgtagtggcccaggcctgtaaacccagcacattgggaggctgaggtgggaggattgcttgagccccggagttcaagactagcctgggcaacatagtgacacctaatctctatgcctccacccccaaccccccccaaaaattagccaggtgtggtggcacatgtctgtggtcccagatctttgggagaatgaggtggaaagattgcttgaaggcgggaggtcaaggctacagtgagctctgatttcgccactgtgctctagcctgggcgacagagtgaaaccgtctcaaaaaacaaaacagaacaaacaaacaacaaaaaaaacaggccaggcacagtggcggctcacgcctgtaatcccagcactttgggaggccaaggcagggaggatcacttgaggtcaggagttcaagaccagcctggccaacgtggtgaaaccccgtctctactaaaaatacaaaaaaattagctgggcatggtggcacacgcctgtaatcccagctacttgggaggctgaggcaggagaatcgcttgaacccaggaggggaagttgcagtgagccgagatcgcaccactgcactccagcctcggtgcaagatcaaaaaataatatccattggattcatggctctggggggactgctgaccacagcaagacacgttttaggggtgcagtggggttggatgccaggtggatgcaggtgggccatggagacctgtgggtggagatggcgcttcagagccaggcgctggggagggaaagtggggcttggtaccagggggtgcatcgggcaatttttgagccctctggtccctccctgctgtccctgcagctcggtagtaatgctggagattgacaaccggctctgcctgcagtcgcctgagaatgatcactgcttccccgatgcccagagcgccgctgactacctgggagcgttgtcagcggtggagcgcctggacttcccgtacccactgcgggacgtgcggggtgcggccctgccttggggagggggtggcgggggcggagctgggggcggccgaagccccgcctgaggccaaagccccgccctcggctgaagccccgccctctgcttcctgctcttaggggagccgctggagcctccagaacccagcgtcccgctgctgccactgctagtggcgggcgctgtcttgctgctggtcattctcgtcctgggtgtcatggtggcccggcgcaagcgcgagcacagcaccctctggttccctgagggcttctcactgcacaaggacgtggcctctggtcacaagggccggcgggaacccgtgggccaggacgcgctgggcatgaagtgagaaccctgctcgctccctgtccctgactacggggaccttgtgaaccctggaccccgccttgacctgactcagacctctgaccccaccccaaatcctccttcccagctggacacctctagtgtccccctcacatcccctcttcccattgtccgccaggaacatggccaagggtgagagcctgatgggggaggtggccacagactggatggacacagagtgcccagaggccaagcggctaaaggtactgccccccctctgacctttgccccctcctctgacccctcccctcagggtactgggtggggtccccagtggatgatgggcgtgatcaggggatggcaccgctgtccccacctccctagctccagagaatagtcccagctttgcaaccctttcttctcagtgtggttctgtgacctcagagggaggaagatttgccactggggccccaagggtccctccgggcaggtggaaaatcctcccctccatcctgcccctccccagccaggatcctgcttcctggccagcctgcactcttcctggaggtgtccccccagcccagagagcgagtctgccttatctctgtcagttcctattttgtccagcatggacttagcctgaaagtgctctgagccggttctgagctcatggagtcatgcccctgggttcagtatgagtcagctttggctgccattaaaaaatcccacagaggtggatcacctgaggtcaggagttcgagaccagcctgaccaacatggtgaaaccccgtctgtactaaaaatacaaaagattagctgggcatggtggcgggcacctgtaatcccagctacttgggaggctgaggcaggagaatcccttgaacctggcactccagactgggcaacaagagcgaaactccgtctcaaaaaaaaaaaaaagtcccacagcatgggtgacctaaacaacagaaattaattttttcacggttctggaggttggaagtccaagcccaaggtgctgtcagggctggttcctggtaagggctctcttcctggtgtgcagatggccgccttctcactgtagcctcacatggcctttcctctgtgtacacagaggggagagagagagagagagagagagagagagagagagagagagagacagatttgacatcccatcctcttcttgtaaggataccaatcctattggattagggtcccacatttataacctcatataaccttaattacctccttaaaggccctatctcaccaggcttggtagcttgcaccagtaatttcagctacttgggaggctgaggcaggaggatcacttgagtccaggagttggagcctgcagtgagctatgactgcatcacttcactccagcctgggtaacagagcaagaccctgtctaaaaataaagtcctatcttcaaatgcaggcacatggaaattttatatattatttagggttttagtgtatgatttctgtttatttatttatttattttttgagaccaggtctcactctgttgcccaagctggagtgcagtggcgtgatcttggctcattgcagcctccacctcccaggttcaagtgattcccctgcctcagcctcccgagtagctgggattataggcatgtgctaccatgcccggctaatttttgtatttttagtagagatggggtttcaccatgttggccaggctggtctcaagctgcagacctcaagtgatccacccgcctcggcatcccaaagtgctgggattacagacgtgagccaccgtgcccggccattgtatgatttttagagggggcacaattgagtccatacagatcctgctagcattactgaggcacccgctgaatgtctctaatgcacataaaacatcttatttcatctctctgaggacgctgtaaagtagctattgacatatacttcaatttacaaactcccttcctctgtccatattttaatgttgtgaaatggaatcatctattacagtggacagataaaaaaacctgctcaacccagacttttccttctgccttcccatcccaaagtaggtattagaggtattaaaggggtggcccaatgtaattgtggtggtatcttagcatggtggaatggctgcgtcatcctgattttgccaatgagaagctcagagcttcaaagtgatttgcccagagccttccagctactaaggggtggggttggaacttgaacctggatcagatgctatcccaatctgcttatactgtgtgcttatagtcccagctacttgggccgctgaggtgggaggatcatttgagcccaggaagttgaggctgcagtgaggtatgattgcagcactgcactccagcctgagtgacacagtgagactcagtctctaaaaaatatatacataaataattaaagccatttattactcaaaaagaccaaaaaaaaaaaaaaaaagaaaccttgtgtcttccttttattacctccttgggctatggcacacattgatttcctgttaatctcagcactttgggaggctgagaggggctgatcacctgaggtcaggagttcgagaccagcctggccaacatggtgaaaccccttctctactaaaaatacaaaaaattagctggacaccgtggcatgtgcctgtaatcccagctactccagaggctgaggcaggagaatcacttgaacccgggaggcgggggttgcagtgagctgagatcatgccactgcactccagcctgggggacagagcgagactctgtctcaaaaacaaataaaacaccaaacagatggtaaatgatttcccagggctctgtgtgtatctcctaaagagaaacctgtaggaatgcccagccccatccctggcagtggctctccccagcaccaaagggtgagatctgagatccagggtgcctgcccctccaggtagaggagccaggcatgggggctgaggaggctgtggattgccgtcagtggactcaacaccatctggttgctgctgacatccgcgtggcaccagccatggcactgacaccaccacagggcgacgcagatgctgatggcatggatgtcaatgtgcgtggcccaggttagtgacagtgcccctcccaaagggatgcccctcacccatcctacctgtgagaggttatttctgactctgtgttttggggagaactgggggagtctctaagcttctgtgaagggtgtgtgtattcagcaacactcttggttggaagtgacaaaggtccaactcagactagcttaagtaaaacaagggatttatcaactcatttaactaaaagtggcacatttggatccaggactcagttttcccctctctaccctttgactccaatcttacaaaaccttcttaatgctccagaaaagtctcaggatgcattctgattggacagactagggtcacgtgctcatccttgagccaatcagtatgaccagggggctggaatatgcaaattgaccaagcctgattcacatacctgtctttgagctggtgggggtcgggtctgctggtggagcggggaggtcagtctctacccagggcttgagaatggagaaccggatgcaagtggctccctaagaaaaatgaggacaagtgcttgtgtacagtgtgtgcagtgtagcggactatgttgtttgatcctcttagatccatctttgttatgtttcagggcattcctgccttagcttcattttgcttatgctccaaatggcctgtacttatggctctcttttgaagtccctctggctgctggggcctgaagtgcctgggattttatgtccctgggggcagctctttttttcccccccccttttaaaacactcaaatgaattggcagaaaggggcagctcctaaccagtgggtgcaggagtatgaaggggatggtttctttgccttgagttggattagaactctggggtacaacacatgttccagagtccctttggaggatcaaggtggaataaccctttgggaatttactggaggttgcacacttgcttgactcccagagtcccttgtcctgtgttccctgtgccctaggagtagttctgtgacaaatcacgtgcccacgaatcctcattctgggtgtgggtgtgcagacaggaggatctgctaattgtcatttttccatgtgtcccattagctcctaatggggtacccttgataacatttcctggaaaaggccctgtgtttaccttcctgctgacacactcctgtccctgcagatggcttcaccccgctaatgctggcttccttctgtgggggggctctggagccaatgccaactgaagaggatgaggcagatgacacatcagctagcatcatctccgacctgatctgccagggggctcagcttggggcacggactgaccgtactggcgagactgctttgcacctggctgcccgttatgcccgtgctgatgcagccaagcggctgctggatgctggggcagacaccaatgcccaggaccactcaggccgcactcccctgcacacagctgtcacagccgatgcccagggtgtcttccaggtgagataggcacacactttggacctcagagctggggcaggcattagacttacctgggtttgagccccagttctgcctttcagactcattttttctcatttggaaaatggggatatatgggaatacagtatctgtcaagcagctgctccctgaacctcaccaatttcaggggttggggtatgggggttggggacttcatgggacttaggggtgctcctgattcctctgttcctgccatgacccctcctgctgcatccactctctgtcctagattctcatccgaaaccgctctacagacttggatgcccgcatggcagatggctcaacggcactgatcctggcggcccgcctggcagtagagggcatggtggaagagctcatcgccagccatgctgatgtcaatgctgtggatgagcttggtaggttggcagaggaatcaagtctaagctgggttggtgtcacctgggccctgagggtcatgttggtgcaaattcatacccatgttgagacccaatcactgaagctcacgcacacataaccaggcttcatgaagcctgcagggtcatgcagggtcaccactagtccttagggtgcctcagggatttagaaaaaggtgcctttcccctagatacttcatttccacctgctttgttagacggacacactgtacttccacctgctggaagttattataataaacgtacacatcaggccatgtgtggtggctcatgcctgtgatcccaacactttgggaggctgaggcaggaggatgacttgaggccaggagtttgagaccagactgggcaacatagtgggttctacaaaagttttttgaaagattagccatgtgcggtggtgcatacctgtggccctagctactccagaaactgaggtgggagggtcgtttgagcccaggaggttgagtctgtgagccgtgattgtgcccctgcactccagcctgggggacagactccatctcaaaaaaaaaaaacagtctccagacgttgccaaatgctctgggggctgggggcagggagtttctcctagttgagagccacagttctagggcagggctggccaataggactttctgtgatgatggaattattctctgcactgtccagtatagtagccactggccacatatagtgacttgaaatgtgactgaggcaaatgaagaagtaaatgttttagttcatttaatttttttctccttatgttgccctttttttaatttttttttttgagacagagtctcactcttgtcacccaggctggagtgcaatggtgtgatcttggctcactgcaacctccactacccaggttccagtgattctcctgtctcagcctcccaagtgtctgggactaaaggtgcccatcaccatgcctggctatttttttgtatttttagtagagacggggtttcgcaatgttggccaggctggcctcaaactcctgacctcaggtgatccacctgccttggcctcccaaagtgctggggttataggcatgagccactgagtccatccttttttttaaaaacaaaaaacaaaaaacaaaaaactgctttattgagatataattaacatgccatacaattcacccatttaaagtgtacaattcaatggctcttagtataatcagagtcatacaactattaccacaatcaattttagaacatttcatcacctgaaaaataaattctcaccacttggccatcatctgccaagcccctcatctgtccagccctgtgcaaccactgatttgctttttgtcttcatggatttgcctgttctggacatttcatataaatgtaatcatatgatacgtggtcttttttgtctgcctttttttcagttagcattatgttctcaaggttcacccatgttgtagcatagttcagctgaataataatccattgtgtcgatggaccactttttttttcttttatttttagacatagggtatcactctgtcactcaggctggagtgcagtggcatgattacggctctctgcagcctcaaactcccaggctcaagtgatcctcccatcccaccctcctgaatagctggtattacaggtgtgtgccagcatacctgggtaattcttaaattttttgtggaaatggggtctcactttgttgcccaggctgatctcaaactcctggccttaagcaatactcccaccttggcctcccaaattgttgagattataggcgtgagccactgtgcctggccaaaagtttcaattttgatcatgtccaatttatctgttttgtagttgttattgttatttgtggttttggtgtcacatctaagaatcttggcctaattcaaggtcatgaagatttactcttatgttttcttctagatgtttagttctatagttggagctcatatatttaggtttctgatccattttgagttagtgtttgtataaagtgtgaggtaggggtccaacttcattctttgaatgtgaatattcagttgttccagcaccattagttgagaagaccattctttccccattgaatggtcctggcacctattttattaaatttaaatctaaagaaccacatgtaggttgggcacggtggctcatgcctgtaatcccaacactttgggaggccaaggctggtggatcacttgagcttaggagtttgagaccagtttgggcaacatagtggaactctatctctatcaaaaatacaaaaaatcagctgggcatggtggtacatgcctgtagtcccagctactagggaggctgaggcaggaaaatcgcctgagcccagcaggtagaggttgcagtgaactgagattgtgccaatggactccagcctgggtgacagaacaagacactacctcaaaaataaataaatggataaataaaaaccacatgtgactgactactgtattggatgtcacaaccctaggttcaactgaaggaggtccacacagcaccccctgtgtataaacagtcatgcacatgcacgcacacacacacacacacacaaacacacacacacagacacaaagtgcttccccattgcacagagtcattttgcagatttgcacacacatggatccagacacaagtacttggatattcacggcaggcctgcctcctctacccctaggccacattctagacaatttctgcctccctgacatgggggccccaggacaggtgcctggtcctgacctctctccccttcatcctccagggaaatcagccttacactgggctgcggctgtgaacaacgtggaagccactttggccctgctcaaaaatggagccaataaggacatgcaggatagcaaggtgagccccagcccttggtccactgggtgtcagcagtggcacagtgccattgcaatccagcctgggcaacagagtgagactctctcaaaaaacaaaacaaaataaaaccccaaacattggattaaaatataatttactttggtgactaaagtttttgggggccccttaaattttgtgcctaatggctgggtgtggtggttcatgcctataatcccagcactttgggaggtcgagatgggtggattacttgagttcaggagtttgagaccagcctggccaacgtagtaaaaccctgtctctattaaaaatacaaaaattagctgggcgtagtggtgcacacctgtagtcccagctgctcgggaggctgaggcaggagaatcgcttgaacccggaaggctgaggttgcagtgaactgaaatggcgccactgcactccagcctgggcgacacagtgagactctgtcaaaaaaaaaaaaaaaaaaagacaagaaaaaaaaagttatgcctaaggtgagtacctcgcttaactcaccctagtcctggccttgacctctggcacttagtaggtgatggatgaatgtggtttagaggaaagaacttgtccaggctcccccagcacagccgggatttaacccaggtctgtcaagctccagtgtacaaactcatagctctcgggctcccccaagaggctggaagactttgctactgttagctggggtttcgctgacctctgtgggttctggccccccaggaggagacccccctattcctggccgcccgcgagggcagctatgaggctgccaagctgctgttggaccactttgccaaccgtgagatcaccgaccacctggacaggctgccgcgggacgtagcccaggagagactgcaccaggacatcgtgcgcttgctggatcaacccagtgggccccgcagcccccccggtccccacggcctggggcctctgctctgtcctccaggggccttcctccctggcctcaaagcggcacagtcggggtccaagaagagcaggaggccccccgggaaggcggggctggggccgcaggggccccgggggcggggcaagaagctgacgctggcctgcccgggccccctggctgacagctcggtcacgctgtcgcccgtggactcgctggactccccgcggcctttcggtgggccccctgcttcccctggtggcttcccccttgaggggccctatgcagctgccactgccactgcagtgtctctggcacagcttggtggcccaggccgggcgggtctagggcgccagccccctggaggatgtgtactcagcctgggcctgctgaaccctgtggctgtgcccctcgattgggcccggctgcccccacctgcccctccaggcccctcgttcctgctgccactggcgccgggaccccagctgctcaacccagggacccccgtctccccgcaggagcggcccccgccttacctggcagtcccaggacatggcgaggagtacccggcggctggggcacacagcagccccccaaaggcccgcttcctgcgggttcccagtgagcacccttacctgaccccatcccccgaatcccctgagcactgggccagcccctcacctccctccctctcagactggtccgaatccacgcctagcccagccactgccactggggccatggccaccaccactggggcactgcctgcccagccacttcccttgtctgttcccagctcccttgctcaggcccagacccagctggggccccagccggaagttacccccaagaggcaagtgttggcctgagacgctcgtcagttcttagatcttgggggcctaaagagacccccgtcctgcctcctttctttctctgtctcttccttccttttagtctttttcatcctcttctctttccaccaaccctcctgcatccttgccttgcagcgtgaccgagataggtcatcagcccagggcttcagtcttcctttatttataatgggtgggggctaccacccaccctctcagtcttgtgaagagtctgggacctccttcttccccacttctctcttccctcattcctttctctctccttctggcctctcatttccttacactctgacatgaatgaattattattatttttatttttctttttttttttacattttgtatagaaacaaattcatttaaacaaacttattattattattttttacaaaatatatatatggagatgctccctccccctgtgaaccccccagtgcccccgtggggctgagtctgtgggcccattcggccaagctggattctgtgtacctagtacacaggcatgactgggatcccgtgtaccgagtacacgacccaggtatgtaccaagtaggcacccttgggcgcacccactggggccaggggtcgggggagtgttgggagcctcctccccaccccacctccctcacttcactgcattccagatgggacatgttccatagccttgctggggaagggcccactgccaactccctctgccccagccccacccttggccatctccctttgggaactagggggctgctggtgggaaatgggagccagggcagatgtatgcattcctttgtgtccctgtaaatgtgggactacaagaagaggagctgcctgagtggtactttctcttcctggtaatcctctggcccagcctcatggcagaatagaggtatttttaggctatttttgtaatatggcttctggtcaaaatccctgtgtagctgaattcccaagccctgcattgtacagccccccactcccctcaccacctaataaaggaatagttaacactcagtgttgttggtctgtgtctaggtaaggtggggagtggtggcagtgggacttctatctcccccacccagggctaacttgagctcccatcttggggtaaatacatttgacttgccagtctacttatgcttcctcttttggcagatgactaccgattggattagtggttgtcacctgacttaagctgagccaatcagattcttttgctcgagaactttctttaatggagaggctaagaaagttgtcagttggtggagctcttaaggtcacaatcagatttagaaatatcagtggccaattcgaggtggtgggcaaagagacaagcaaacagggcagaagaatgaagctaatattcagggagaatcagaaatgagagctcaaatggctccttgagggctgggggggttatctcggctcccagtgcagttatcaattccagttaattgagtgttcattccattgagatcaacaggtatttattaattgctttctaagtatctgatcatggttctgcatgaatttcacttttacttcatgctcctatgggttttggagataaccttggacccatgtaataaatacttctttacttgtgccagcttcggtgggtttctgttactcgcaaccagtcgtgctccaagacaaggttctgtttacactggtgtcttcaggaaaggaggataggatttaatgttcgttgattctgtcagttggagtgctcctggttgcaaatgacacaaaagtctactggcttaaacaagaaaggggtttattagctcatataaattaaaaggacctacttcaggggagaattgatctagtggctcaaatgtggtcaacaatggctcagtttctcttcatctctacagctttctctgggcatcagtttcatctacatgctccacatggcacccagtagaacctctcttcccgacatcacacagctccagccttctctctgtgttatcaaaataggtgccatattgctccttccagggaagagagaaactcctagtattgtgattgatttttcttttactttcttcctttttttttttttttttttaagatagagtcttgttcttgtcacccaggctggagtgcaatggcacaatctcggctcactgcatcccccgcctccgggttcaagcaattctcctgcctcagtctcccaagtagctgggattacaggtgtcca

SEQ ID NO: 29 - DNA, 57103 bp, Homo sapiens
ttgaacaactggggttgcgatccagtgtatgggcagtcccactcctggaactccagggtgggcactcgctccatttccacaggccctcaagggttccaggattgccccgtgggaggggttttagtgctgcatctagtaagaagctgtaagatgctcagaaacatgttttgaagctactttgcacagaaagaagactcttcattcagatttgtattacagatcaataaaagtagctaagtcgtatctgaagatgtttttgtttacactttgtatgtgacagaaaacctccagttgtctgtgtcaaggacaattacttaattttattacaatgtatactgatttggttagtggaagcttctagcgcctactgtggtggtggtgggagctatctgattcccattcccaggcctggccatcgacgcgaaggcctccagctgatcggaagtcggcgttggccggcgcggagcccggcgcggaggcttctttcagccgcccgggcaagacacccctccctcggtcccgcagcggtcactccgcctctggcgcgcatgcgccgaccccagcgggcgtcctcccgggctccctctccctccctccctcatccgggtcctgggcgagcgggcgccgtgcgcgtgtcccgcggccgagctgctaataaagttgcagcgaggagaagcgcagcgacggcgtcgggagagcgcgcctagccggctcgcgagtgagtgagggtccccggcgcgcgcgggcgaggggaactgggggctgcaggctctgccccggcggactcgggccgaggcgggggcgttcggccgcggacggagcggaaacgacccagggcctgtcgggcgggaggtaggccgagtcctggcctgccggggtcccggctggcggacacggtgcggcccagcggctgcggaggcctcgctggctgcccggggcgtcctgaggcggggccggggctggccctcgtcccagccccgctgttaccgcccagactttggagggaggcgtctgggacgccctggaggggaccccctgaccccgcgctgtcctggggagcggtttgctttcctaactcatcggatgtaccaccctggatacacacccttgataggactgcggtgctcggccgggcagcctgggctgctgcactgcgaagctgtccaatggcttgatgaatccgtgccgccgtcgctttgtgtttcaaagataaggatccgcgcttatcggtgggaattacactctgggcagttgtgaccggctactgcaatcagctggtagttagacctggtttctgccacttgccatgtcagttttcaccactgcaaggatttcttctacttcatgtaaacttctctgtgctgcaaagagaatgccaaagcagcgtctttttgccttcaccatattcagccgctggccgggtcctatacttcaatatcagggctcaaattaatattccagtctcttcccctccccttttcccctctcctcctttcagctgctgttactacgtggagtttggagcctaagctttgaaaactcccatgtggcgcgcccgtcttaagtctgagcatgctcagtagccaaaacagatttttggttgcagaactcgggcgaggatacttggggtatttggacgtttgccggcttcccaacagaatgttccggttctggtggtgatggcattggagaatggggcttaggcaagcctgtaggtgaggaatggctgaacaccctgagccagatgtttatcttgattgtaaagacaatgtttcctgaccagctggagctttggggggggggggggggtgttgcggggggagggagcaattttggttgcttgtgcatttaaatgggtgtggcgctaagtatatcttgtttaccttatctttctgtggaaaagttttgatgtctaggtttgtcacatcatgcctgttgcctagcactaccaaaagggttgttatctagcagcaaagattgaataggtggaggtcgtggcttggcctcacagaagttgagaggaaagggtacttgggttgcgtttttgaaaattcgtatttaaaactagagtacttgaatttccttagagtacctgaattgcccagagtgaattagtttttaattttaatttgaaagacaaaagattgaaaaccttagtcccagtaggtttagtaacattccaaatagcttacaatttctgctagatgccaatgcagtagtatccattgtggggaaaacagtacctacattcagtgtgacagtttcacatttatggatccaaatatcattatgaaattagtgttccaaatttaaggagctatttgcagatgtataacaaattattttagtcttttattcctttggtaactattaatatttttttctctacagtgaaaattgtaaaaatgcaaaacttagacaatttaacaaaacttaaccttcataaaggttgtagatactatgtttagatttataaagtttaattttgatgattatttgtgtgattgttcctatacagcttcctttccttccctttccacattgttgctccctcagtcttttttacattactgctgttaatttacccatgtatctttgttaaaaataccttattcatcattttgtgcttccattcctttcagatcatagctgaaataagcaagaaaagttagattaaccttctcaactgactttactctcaggttttaaaggcatccacatgatatggtctagttaaaaggaggaagagagcagcaaactggaaaaaaagaataaaatattttcgtaggttctgtacagatctggtagtattatctgcgtgtctggttcactgtggtaggcgccacagaaatgggtagattgataatgtgttggatttctttcccctctggcaaagtcagctattaatttcagtgggagacagtggcagaatgttgttactaatgaggtttgaatcagattgttgtttactgttggttatgtaacatgttgctgggagtattattaaaagttgcattctgcagcaaagtagaggcaagtaaattctgcttaccctcttcactgggttttaattcttggctgaacctgaaggcacattagattacaaccataattatacctgggcagcctgtctgtttcctgttttcatcatgaacccaaacattatgatttgcagtgatgatcttttttgtcctttgcattgaacggaggcagtgtgttttctccctctactgaaaacagatttgtaacttggtcaaattaaagattttagtgttttgaaaactaggcagtaaaataccagtttttcatttcttaatacagttacttaagttgaaataccatctaaaaaaatctatttcatatatattctttgtctttatgtaaattttaatattactagtactttgtagagttaaagaaactctttttgtttatgacatatcagtgtttattattaccagatgtatatgttggtctaggcaatgagccacacatctgggtgaatttcagagctgacttgagtacgcttgaggatataggtgtctattctcttggtttatcagtcttccctgtttttacttctagacgatctatattccttgtatctgtctgtctgtctctctgtctctctgtacactaaccacaaagaaggcaaatagtttatttcttcaaatgttacaagcagcttatagcctatgatttgcccgtcttctcatagggtcaaagacattgagtaagattcccttttataagggatactagtagcctgaggaatgattcttgtctccaccagtctggatattctagagaaaagaatacctggatattctagagaaaagaatattctagagaaaagaaaaggcccaaggaagctgggatgcaatatagggtgctttcccatcaaaacagatgatgaaggacccttggaagctgacccatggcatccccccgccactgggttctagctctgtcgcccaatctggagtccagtggcgcaatcttggctcactgcaacctccgcctcccgggttgaagcaattctcctgcctcagcctcccaagtagctgggattacaggcacccaccaccatacccggctaatttttgtatttttagtagagacggtgtttcaccatgttcgccaggctggtcttgaactcttaacataccttgtttttccacttctgaagttaatagaataatagtcattggaatttgcagttcattggtgttgtcacataccctttacctctaatcagaagtctgaatctgagaagtttgtttactaaatgggaggtaaagatttagaactcttttggaagaattgttaaaaactagattgttgttaggactaatctcataggccaccttaatattctaacagctttgttgttttccaacctggaaagatggggtaattacagagttcttaggtttttcataaataatcagctagttctgggctatttatttgagagtgtctctctctgtcgcccaggctggggttcagtgacgcgatcttgactcactgcaattctgcctcccggcttcaagcgattctcctgcctcagcctcctgagtagctgggattacaggcacccaccaccacgtccagctcattttttgaatttttaatagagatggagtttcacctcgttggccaggctggtctcgaacttctgacctcaagtgatctgcccgctatggcctcccaaagtgctgggattacaggtgtgagccaccgtgcctggctgggctctttatttagttttgattttttttttttttttttttgccttgggcagctaggggggatgtttttggcccagttctagtagagtggtgttttcagtgacttttcttcctccttttactgtatcctaccttggttgagatgatattttgcaagaaagagttctttattaagtcagttctgtgtgtgcaatactataattgtaattcacttttggaagctagttattaacataacattttgtaactaggttttgctcttgaattttttgggacccccccccgcatctcttcctatagcatatatgtactttatagactggtacaatatagaagtttgaaagtgatttgacctgttaagattttagcaggattttttcttttgatatccatatatgttgttttgttataccgaaaataatagaaaaaaactagtgtcccattcccactttttctctgagcatagcaactggagtcttgggaggaggcttacatctttcaaatttaactatgatctcagaatatggctggtgctttcaaggcaagttttgttttgttcaggtttgttttcatgatgtgttaggatctgcctagtatcctatctggtaggctgtacaacttgagttctagttattctggtttgtgtgttcccaggaagaggggggttctgcaaaaatatttaaaagccagtcttcttctgttttcttcttagtcacatcttctgtctactttactcattgaccatttctcattctttggagatgaaagtgtaaattaagtgaatgatgacactagagctgaaaagttacccagagtcatgtttattcccttttctactaagcagggaacttgaactctgggtgcacatgagttctctggagaacatcttcataatgcactgtaatatatgtcgtgtacacaggttagctctttgtgctccagagacacattttacagtcatgatttggtatctgcacttgatgattttataatttaaaggaatcactacaaagattgaccagctctgtgtctgttcctgtgcctacacgcctgtacaagcatactcaaacacatctggtagcaatgtaggaaatcttgcaggctctgtgggggtgagtgatacatttagatcaggctctgtttaattaggggacttagaggagcaggtgaagcttaaagagtgattaaaaactgggaaacaaaagtctggctgtgggagataataaagtagagaattctgtgggcacagaataggcaagaagattatgcagtgagaagtgttgggaatcatgagttcagctcctgaagggctttgaaatctgctatgagaacttcttatgtctttggaaatcgggagccacagttgaggaaagtggtgatttaaatgtttctctgtgaaaataattttggcgcccatgtaattgtatcctgtctttcttgtagatgttcttataaagaataggatttctgaatctagaagagctgtgagcaaacatgcttttggtttccttctcctctctgcgtgcagttgtgaatgtggcttacaaagttgatagcagttgtatacatggatctagggatggtttgacagtggtggtggtggttgtctacttgctgacacttggtgactactattgataatgagaaccacaagggtaagagatttttaaagctttacccccacatcccccctgcccccaaaagttacccttaggttgtatgtatgcaagtgtctttcttccattgcaggagatcctgagcaccttggttcccaagcctcctgcatggtccgagattcttgttaaaaatgtgggcagtaaggcccttctgccaagcttagtgaatctgaattttgagggatggttctaaggaatttgttgatttaaaaaccccatgtccaattattttgtacaggtttgaattagaatacaatgggttgtgacccattatgggcatttattttcatgggatgatgtgctcaggagattttgttttggccaatagtgttgaggaaaatgtggggattggtttgcttgcctttttatttcagattgcagcagtcatagagatgttggagcacaaagtgaaagagttgtttctgtgaattcactttagaaatctagctgtgagctctgtgtgtgtgtgtgtgtgtgtgtgtgtgtgtctttctgtatgtttttctgtatgtatgtgtgtctcggggtgggtattgaagtcagtttgtgtgtgtgtttattatgaaagttggtcaggatgtagtacttccataaccttaggtaagaacaggacctttgggttattgattcaacatgaattcatttgaaatagaagctttgtgaagcttagcaacattttattcatatggttaatgtgtataaaacttaaccctgaatcttcctttagctttcttatctgcatttgccaaatcagttgatgtcaaaccccattcttccagttgtccaggctgataccttggaatcattgttaactcctttgttctcatacaccccatgatctccttcatcaggaagcttactgtctttcatatgtctgctgctcaccaccccactgctatcaccctggttgtaagccatcgtcatcttctcccctcccttagattactgcatctctgaactggtctcgctgcttttatcattgctgtccacccctcctcctgcttattctcaacataccagccaggatttatttatttattttgagacggagtcttgtgctgtcacccaggctggagtgcagtggcatgatcttggctcactgctaccttgacctcttgggctcaagtgatcctcccacctcagcctcctaagtagatgggatcacaggcatgtgccactgcacctggctaattttttaattaaaaacaatttttttttgtagagatggagttttaaaaactatgttgcccaggctaggcttgaaccgctgagctcaagtgattctcctgccttggccttccaaagtactgggattacaggcatgagccaccacgcctggcccaggataactctttttttttttttttttgagatgaagtctagctttgttggccaggctagagtgcagtggtatgatcttggctcactgcaacctctgcctcccgggctcaagcaattctccttcctcagcctcccaagtagctggaattacaggcacatgccaccacacccagctaatttttgtatttttcgtagagacggggtttcaccatgttcgccaggctggtcttgaactcctgacctcaggtaatttgcccacctcggcccaggataattctttaatagtgtaagtcgagaactatcatgtctgtgctcagagctctccactgagttcacagtttccttagagtactgtaaaagctaaagcctttatatccagcatggccattctggctctctggtatctctttgaccccactccttaccttttccccctcgtacactgtgttctcaggctatactggtcttctagccagtatatgctcttcatgccagaagcatgccagacatgctcctaccttaggatctttgcattgcctgttgcctttacctgtaatggttttcccctagatatatgcctgttggctcactcttttatttccttaacattttaactcagttggcaccttcttggtgagacccagcccagccaccctgtttaaaattacacctctcttccaggacttcttgtccaccttcccctgttttaatttttctctatagcacttttcacctaacaaacatatcatttactatatctcgttggcctccttctgctggaatataagctaaatgaagacaagtgttttggttccttttattcacttctatattcccagctcctaaaatgctatcttaataaatattcttttggatgaatgacttgaatgaatttgacaagttattgtaatgtatgtggtactgttttttaaagattatattctagtgcgagagacagaaataaagtaaatgaacaaattattatgaatcagttaatacagtgaagaaaatgaacatagtattggattagagattagggaaactctatataggattatggggtgatcagggaaggtatctgggatgagagctaaagctgagacttaaataacgatagagctaaaaattagtggccagggattaagaaaagtggtataagcagaaaatggcatttgtaatatctgaggttcaaaagacattccagtataggaagataaatgcttttgaagaatgagttcttactaatatttattgggagcaggaataatgcttctggagtttgatttcattgttttgaggagcaacagctcatttgtagtaacaggacacactgtgaaaagtgctagatacctggattacatgccctttctctgtctctctgtgttcctctagtaacttgagtttatctcattgtacttacatataggggtatagtttggtgtctgtcgtgctacgttattctgtgaagggagattctgtcccgtttgcatttttgctattcccactcttcactcatatagtacctttgtatgggacttagaaaaaggccttctcatttattccttcacccttggctagtgctgataaacccctgcatgtcctacaatgtctgctagttagtaggtgctcaataagtgtttaatgattcatggctgttatagctgctgagtcagttaatgcacatatacttaaagaagtaggtgtaccttatgataatcatttctgtatttctgttgattaacctagagtactatagttatggaagtatttgtacctagtttctgatttgatttttcttagtttcaacctccaaatttgtataaccccaagtatattagagagaattgttttgaagcaggaatgactcatgataatgtaaatcctctctttagtaagggttcataatatggctgaggtatagctgcactttaattttgaaacctgtttttcctctgactcttcaagaaatatgtttattttaaaaaatatagaattagatgaagcagaaagtgaaaagtacacctaaccccaccaccagagctaatatcacaaaccctttctttcattaaacaaatatttattgagcatatgtatcactaggcttacagtgatgagtgaaaacagatacagctcttctcgtggaatttacattcttgtggggacagatttgaaaggtaaatgtaaaaacataggtgtggtaagtgctacaaagtaggagtatgtgatgcggtaagcatataagagggggacttctagccaggacggtttgggaagacttccccgaagaagggatgcttgagctgaaagagaggtgaggtgtgtgtgtgttttgtaatgtgatagattcatttgtaattcatgatataccgtaattttataaggttttcatttatggctgaggtaccactgcatctcttttggtacactaatgacgttctgtgttcagtcagtggttgcagtttttcagaagaatcagggaacctcacgtacacaggaatttctaaatattatgattaccttggttttctttctagctttgaggtcatttctctaagaaatgacaaaatacatcaataaaagggtattatcaagtcaagtcttcataaaccaaaggtatactatgaaaggccaagataatagcagataatgggttcatagctgttaagtccctccagtttctagtgtaagaaggagcataccttcctgtctgttcaattattggctctctgtgcttggtgtacatttttttaaactcaattttaatgccctatttctgttggctatcatatggaaataaatataggataaaactaagtgataggctaaatggcatatgaaactctttatagcccctgttcttttttccattactctctaagatcttacagagattatggttagtgtcttttaagcctgagttcctagcatggagtattcctgacatacactagtgggcacccggtaaattttgaataaatcaaatgtctcctctgtctaatatcacaattcatctctccaattcatatgatcctcaatatctacatatttattccttttctccttgagctttaattttatatcttcctggatgcatgccagtatttgtttccttatgtccctccactgtcaccttcttgccttgttttggccataactagagttaccctttggtaagtgatgttttcattattcagggtttaaaccttaacttttctagttaggcttctgtttatttgtgacatccctcgtatctcttttttttttttttatttaatcacggtgtgtgtgtgttcctctcagttaggttactaccatggttttcatctacgctttgtccccctagttagtctcttacttggtcctttgttgttggaatttttgtcttcttgaaatacctcttcgaacatgtctttcggcttagatagaactctacacggcacatagaactacttctagcagtctgactccttagccttgtattcacagtctttccctgtttgaccttcattctgtggttgtgcctttcccttttgcttcacagtcagactagctgattgtcacctcctagcctcccttcctcatttggctgagtgatttggttttcctcgtccttgtactttcttgccaagtggactgtgaatgatagattgttatatttctatctcgtattcagtattttggtagtcactctcaaaatttgtgcttatatgacaagcagttattcttgcctcatccttaagctcctattcacttaggtgcagtgtgtttgagtttgcaggggaggggtagaatctgtccaaaccagctgttttttttgcacagttgctaaaccccctcaaccaacttcttgtctgttactggccatttgcaacacagttaattccttcttaatcagtcatattcaccagtatataatcttttcacttttttcttcttccactttccagttatactgttctttctgttccatgtatgtactctaaatacctcataaaccagaggtatactatgaaaggccaagataatagcagataatgggttcattatctgagtctgaaagtgtttgatcactcagatttaattccattcattcatacggcagttttgatgaaaattgactgtctcacctaacacgaattgtcccgtgggtttcctaatgagattttagatttagattttgggggattctctggttttcaagctagaagtagaaattccctgaaaggtttcatggacactgttcagtgtagtttgtgtttttcttttatgatgctcatggttagcctgttctgaattactgtaacaagacttggcttttaaagaaaaggctgtttgacacttagccttctgaaagtttggtttaatacggccctagtaagagcaaaaaagagaaggcagaatttgtcttctatccctgattatgttattgaaataagattaacatttataaacaactgttttacaataggtttctatggaggtttattgcaaaagaaaatagcttgacgatttaagttccttgaagcctattgactttttggttttcttaggaactaaatatattacctcttaatatgtttagatatatataaatatatcttattatattggtatatattaatatatattattcccactggtgtactttaggataggtatgttaggtggctcaggatgaggattacagaggtgcaaatagaatctgctcagaagccagattgtctagggcattatttcacctatgtggactgtcaaatgcatcttcccttgacttactagagaactcagaagtaagcaagccctggagcacctgaaagtaccaaggatacaaatcatgtattccatgctaattgggttctttttgagacagaaggaaagttcattttcattaggtagtttatcaagtttctccaaaagcaacactgaggaatataggagaagctatgagaaatgcagaaagagaaaagaaaaaaaaaagagttaaaagaatgagaacaaaggaggggttagaatgacagatactgggggcaagtgatggggagcatcagaaaggactttgagagaggacaaaagaaaaagctgccgtatttcttctaagatgtaattttttttttcacctcataacataacattaactgtcttacagttaatagcatctgagtattgcttttggccaggtggcagttttgatctagttgtcattgtacaggcatggctctgacttgctgtttctgttgctgtcatttcagtctcagtgtggacattgttttaacttctcgtgttgagtaattgccatttaaaatattttcttagttgttgttttcacatcttcatttagatcctctagggacaccaaacaggcaccagtatcaaaatttgcaggatggttgtcagtggcttgaaagacagtcctggagcagtgtcggaacattcttcatacttacattcttgatggcagaaggatgatactgtgaataaaaattttaagttataagaaagcattatgccatttactttgcagctttttcttccttcagggttcataaaataatgcggactcttaaagtacatgactgtatgcttattgaaataaaggatcccaaccatttatttaaaatcctcagcctgatagcaacaatgttcatgattattacaacaataataactacagttgccctttattgagtatgcactgtgtactaagtgtttctcacttaattctcagaaccttttagggccatagtattcacgatacaaaataggaaaaaatggagattttgggtgtaagtgttagatccagaatttgaacccaagtttattaggcttcaaatccggtgctgtagttcctcatcctgttatataaagtattactttgtgaaagacatagaagcttttatgcttaagataaaattgtctcccttcatccttctccccaaagggtcatatcctgacttcttttagcgacctttatatctttagggcaactccattctccactgtgtatcgtagatagttatgggcacatttcagttgttctattaatttgtgactatttagagttagtctggatctgatttatatttcaactctttattatctagcttagtgccttgccttttataggcactcagtaaatatgtgttgtataaataaggctataagtgtgagcttaagtttagcactggttattatgtatatttgtgtctcagtagactctgaaagcatttagaaaaggagtatagaggaccaaaatttagctgtccagtaatctgtaatgtgtaaagactgttgcagttgctaagtacagtcttttgggattttctctattactggaataagtgtagaggtgatgtagaagagtattatggggtgttagatacacagctgatttaaattgaagataggtgttctcagtgtttctaaattcgttttatttagtgaaaggcaaagggggcatgaaaaattgaatcaacttttcaggaaagagactcaaaatgttcagaggtattgcaggttcacttgtggctcatgcaaatcagaacgtattttattttttgtatacataatgagaaattttttcataaccgagtacttatgtgaggatactaaagtaaatctattgctgtaacccaagctctctgatcattttatttcaaattttggaccaaggtgttattttgaatatagtatagtctgcagaaaagactaggacaaaatgcatccattatatgggtaccataaagaagttttaatctcagtttaacaattttacttttactataggtggtttagttcctttagaaacctagctgttaaatattaagagaatagatgagtaaaatatgattgcaccattaaaggcatttaaaaaaatctatatattcgggtgagggaagagcaaatgcttgtggtgttaaatagaaaatgcagaataccaagtaatatcatgttatatcctgttacgggcagttgtgggcaagactatatatatgcagaggaaacaaatataagcataccatatgttaatggtatgattataggtgagtatacttaggaaaaatattttttaaggaaaaatattttttaaaaagtggtacattgtctcatcatttctgagatcattgtgttccagtaataagtgtgctaaaaatgtcctaatgataattagaaaagctttggagtaagatcaccacaaaaaaaatatatttttatgcagtggtagtaagcataaagctaaacctttcattcctgctgattgacctagcacaaatgtgagaaggttgggttaaagttgataggttgatgacatacgttaagtggtataaaaataagtttgaaaatgagcaaattaagctggattattcttgatctcttaaactatacaatcttatgataatatttaacaatttgaatgttttggagaagtcaggaatatgaagaacaattacagacctgtaagggaagaaaattccttggcaggagggtttctttctaggaggcagtctgtacagtggtttggaatatggattctgcagctggactgccagggttcaattctcagctctgtttcttgctttctgtataattaagcaagttacatttaatttccctttgcctgttttctcatctgtaaaatgagaataatggaatttgctttataaggctgttttgaaatttaatgatttttggtttctaaatgtaaagtccttaacagtacttggcatagtgagtgctcaataaatgttagtggtttattattattaccattatcaaaggagtattatgattcctttgcttaagcaattgattttttttttagaaaggaagctgttgaagttattgaagtacctgttgctatattctaagaaattaaaatgtccagaaatctgcctctgtaagtaaccttttaagatcattcatgccactctgtttctttagtcagtaataatgcagcccatgttctatgccttctatagagaatttcatttaaaatgaaaccactgaaaaatgtagaccaccattttatactaaatggtgagtaaaaggtctgattttatcttgaagaatgaaactaaaattctgggaaaacattagcttatagtaactgtaaacatgcatgaattgttataatgaacaaataatggatcaagtgtgaatggataaacaatttttcccacaaaataattcagtatcattatatgacagccttcaatttgacatttgtggcattagctttaagttgttcttttttttgcaaaaatattgataaaaatatatatacattttttcaaggacctctgttaaattctttgatagtcaagttactcttaccctcctcccgaacaaagaatgtcttgcttactgattactgtaaaagtggtagattccctgagctcagtattcctcatccatgcatcaagactacaaaaaagcacaaactcatacatataaaacatggagaatcttataatactgaaggaaagattacgtgttattccttctatacaacattcacaaaaaggcaaaactataaaatacatcacattatccccatgggtcttggggacaaacaaaacctcaaataatgtcaatgcttatgctgcttgctgtgcccagagtagcagagtctctaacccaggagtcttatgtcctttggcaccatccagaagacagtaacagactaacttgtaagtggggtaaaatcaaatcctagatcctacattgtttgccatcatttttataaactttggaaatcttggaatttttgcaaaatctgtagtctcactcatggttcataagccattatggtgagggagacacttgtgaatagggactgattttataagtgatcagtcacaagtatgttttaaagatatttttaaaaattgaaataatcatctagtaaagcacacagaattaaagtgtgtagcttaatgaacttctgcatatggtatacatccatgtcatcatcacccagatcaaaatatggaaaatttctagctccctagaaggctgtctcatgacccttcttagtgctcttctggccttgatggcataggttagttttgcctgtttttgaatgttgtgtagatggaataatgtgtaatctttccctcagaatatatgagaattctccatgttttacacatactagttctttctgtagctgtgaagtattccattttatgaatttattaccagtatttacccactctactgctgatgaatatttgggttccagtttgggactattataaataaagttgttaggaacatgtacttgttttttggtggacacagcactcatttctgttggatatatacctaggaatggaatttctgggtcatagggatctatgtttagcgttagtggatactgttaaacaattttcaaaagtgactggactaatgtatattcctactatcaatatatgagagttccagttctgtattatcatgaacagttaatcttttttttttttttaagtgtagccattctggtaggtaccgagtgagattttactgtggtagtttttgttttctttttgcattcatgtgataactaatgatattgagcccattttctcatccagtggctattttaatgtcctcttttgtgaaggatctgttcagatcttttgactattcactaatttttatgatgaatttttctccttttgtaatgtaagttgagacgtggataacaagtactcgggtagcttgcacataccactttaccagtttgggaagtatagaaaacatttttagaaataatttcatcaaaagtgctaagttttttagtcattccatatttaaagagttgagtgtgagatttgctcctctccctgtgctagttttactagtaagagttctaggtttttaaaactgacacctattgttctttttgaaaccaatctcttgaagtttagtggcatacccattcaccaaagtcactggccttttctttgtttacattctctttaaactctcccatatgtttaatcttctgcagtaccattgtatctagttctgtctttttaatagtgcattatcagtaactcactatcaggaaactctttcctaacagtgaatgtttcgtaatatttaggtgtttacttactgttcttttcactctgttgcaaactttttttttttagctctttgtgcaaaatcttaaatctgtttctcatctttacctggctaaacctgtatctccagtcatgaccttttcccagtggagtttaccaccatttctactgacaaagctgccttctgaatgtttttaattctgtgggtagaattctcattttatcattatcttagtcaacgtgggtttaaaatttgaaattatctcttaatttcaaggtacagttagtagaaaaatcagtgaccattcattaagtatcatagtgtgtggtatggcacatgcaatggtccaggtgctgaagactacttcttagaaggattttgtactgtatttgggaagttatgatattatttatgacttattaattagtttttattataaatattcagtgaccatagcctcttcagcattgggtggtaaaggaagtcttcacaaaaggggatagattggagctcatcattaagaatgactaagatttctcttggaagacacagatgggcagaggggcagggatttggattggatcagaaggtgtgtatagtggaagagtaatgggcaagattagattaggactagatctagccagtctcttaagtcttggttcgtcttctttctgaatgctaatgattagaattcatgtttgaatagtactgttgagtttgtaaagcttgtgttagatagacattagtactttaatatttctgtgacttaggaaccatcatctctattttacagaaaagttaataggctttgaaaaagtgatactagtaaagaacagaatctggtgggcacagtggctcaagcctataatgccatcaacttgggagactgagtctggtgtgtttcatttccaggcatatttttattctctgatatcatagatatctataaataacaatttttttgttttaagtttgatatagacatccttagaaaggtatatatatttttacaaattgtttttcttactcatttatttgataaatggacactattctaggtccagggcatccagtggttttgagggcagacgagactacctgcatactaacattgcattggggaaaacaaagtaaataaacaaagttgataatgtaatatcagattagggtaaatgctataaaaaatgaacagggtcaggggatagagaatgttgtgagaatgggctgtcatgctattttcaatcaagtggtcagggaattcctctttcaggaggtgacctttgaacaactgaattaatttgagtgagtatgctgcgttaagttacgggagaagagaatttaggggagagaacatcagatgcaaagacctcacatagaaataaccttagaatacttgagaaatggaaagaagttaagtgtggttaaatgcaattaggtaggataatggttaagaaatgagtaaggagaagccaagggcctgatcatgtatgatattgtattcagaattctggtcttgaagctcctgtctttttgcctccctcttccttaactgtctctctgttgctcatacacatactctctcacacatacgtacactaccctatctagccccccattatattctagtgttcatgaatcagtcagccaggcctgtctcttatctagcctaggaaatgctatgttcatgtctgcctatatatatatttttttgtttgtgtgcctttgcctttgacatttcccatctcatctcagacaaccaaaccatggttttacttcctgacccacatggattttatcatacatccttgatgtagatgcaactgaggtcagcccttcttacagttcatttagtacataacactttatactctgtgacctgttagtgacaattatgctttcattctctttgttatatctctctattttaatgtggccagttttgtttgcctaggaaaaatcatcctacatagggctgggcaagacaaggcacaaggcatatccatacataaggaggatatctttacttccctgtacccttccccaccatggttccagcatagaaggctggatagctgccagtagttgatcggcatccagaactgtatctggtactttagtaggctctcagtaagtgtattttgaatgaatcagtttattgactgttgagattaaaccctacttggcataactttttttaaaaagccccatcatggctattcacaatacatgggatgtaacaaagaatcaataattatttgttgagtgtatgtcagttttactttactctgtgtttacattatctttatttactttatgttattgtctgggctttagctgagcacatacattcttttctggaaagatgcaccccagtccagaataatattgatgctagaatttttcaaagacaaagctatagcttttggcaattgtaggcacaagaaaggaagcatcttttgttacaccatttttccaaacgttattcttgttactttagtaggtatttatcgtctgtggttggctgtgcagcgatctgcaggagatcttacacattctttttattctttatttagaaatgggatctcactatgttgctcagactggacgtgattgaactcctgggctcaagtgagtctcccgaataactgggattacaggtgtgtgccactgagcctggtttttaccagcttctatcggtggagtgcctgtcacttccacctgtcatcatcaggagcttcttaatggtgcagaacagtggtttacctggagcaagctcattaaccaatataaaatatcacttaaaataagccgataggaattataaaattagaaactgacccttttaaaatgaatttattctctttaaatttattcaacatacttagttttacaaatagatacttgccattttactggcagttataatgatttatttgagggtttggtacatcttatacaaccgtgaatacaatttgcatctaataatgtgacttcagtagtatcatgatttttgtccaaaccttctcagtctgggaaacatttaaagagaataatgaccttagagaagagctggatttcttttaagacttctattcagatcaggacacaatcacgttcaaaattgacatagcatgtaacatggatttcagtgaagaaaagtacttcagaatcaaattttagaagagtgttttagggtttagtggcctaatcaaagggagtccagaagctatttttggataatacataggaggtagagcaacctggttttgcctctggttatcatttgacattgccagtgtcttacttgttcatattatggggaaggaatcgagtggtcacagaacttttggagaaaatttatcaattttttgtttactttgtaatgcttttctgttcttatttaataaaatatgcctttcgattatattaatttaaatttgtatatattgaattgatttaaactaggatcctttccccctttctctttcaggacttgacccaatgaaagaagcatatggcacttgtgaagataaatgttactcctccctttttaattggaacttctgcttaggacctgtgtatgacgtttcacctgtgatctgttctttcggtagccactgactttgagttacaggaaggtctccgaagatttgtgtcaaatgacgtcaatggccagcttgttttcttttactagtccagcagtaaagcgattgttgggctggaaacaaggtgatgaggaggagaaatgggcagaaaaggcagttgatgctttggtgaagaaactaaaaaagaaaaagggtgccatggaggaactggagaaagccttgagcagtccaggacagccgagtaaatgtgtcactattcccagatctttagatggacgcctgcaggtttctcacagaaaaggcttaccccatgttatatattgtcgtgtttggcgctggccggatttgcagagtcatcatgagctaaagccgttggatatttgtgaatttccttttggatctaagcaaaaagaagtttgtatcaacccataccactataagagagtggagagtccaggtaggtcttattcctgagaagaatttggaaaaacaaaaacaaaaaacctctcttcctgatatgcatgtaactagatttagtaatgaaaaggttgtattagctttgtgtttccatcttaaatattctaatcttggaagggctattggattttgagtttagctttttatatgtaggtgatacaattctcaggtggcttactctaattcattattcactgtaagcacccatatatctactctgccttttcctgtggatgacctgtctctgttttatttaaagcctaagctccaagtgtgtactatatcccattcctttttgtcaaatgaagaactttgttcctacagttatcatccttctctccagcattatattttccctttctaccagagtatttctgatagcatacaagcatgccatgatactacccatcctaaaataaaacttaaaaaaaaattctgcttttcacttcattcacataacccaaccccaatcactgcactgtttccactggtccttttagaggattctccatttttattatctttatgtttcatttttttcttgtgacttctctagttagtctttctttcctaccatttaacttgtcgagatcactagtgactgcctttttataggtcaaggggtcatttttgagtcttatcttactgtccgctcaactgcatttgatacagttgatctccttccatcctactcaaaactttttctgtgtttggcccctaagacagtatgctatcctggttctcctacctcactgactgttcttgcccctctttgctggcgtattctcctgttttcacaggagtcagtccatggaccttttctccatttatattatttctttatgtgctttcatgctgtcacatgtcttaagattgtctataagctgatgctcacattttgaactcaagtcaacttctcccttgagttttagatttgtgtatccagttgcctacttgacatttccacttgaatatttatttattaaacataccaaatgtaatatgtctaagcgcagttttttttctctggtttcccctattgaagtgaatggcaacagcattcatgtaattgctaatgccctaaactgcaaggtcatcttttattcttcttacttaaatcctatatttaaaatatgagcaaatgctgtttgctgcaccttcaaaatatgtcttaataaatatgtcacctctcatcatttgtgacatcactactttagtacagtacatcatcatcatcactcaccttaagtagtgtcctaattggtctttctgcgtctcttcttccccttaacccattgtgttttccacacaacagccagaatgattttttaaaaacatactaaatcatgtcagttcctactgaaaacactttcaaggctgtcacacttaaagagatttctgtaagactctgtatgacctatcctcagagttctctgttccttggacttgccatactcctgtttccaggctttaactcttgctgtctacttattctcccccaggatctttccatggcacattttctcattccattcagtccttgctcaaatatccgcatcactaattgactctatattagatatttattttgtttattgactgacatgagcagagtcttcctctatttcattcattactctatccttagtgcttagaatagtatattgttgtctggcacttggtaggtgatgctcagtaaattttttttataatgaatggtataagctgagctgctagctgagtgcattagtcatctattgctgcatgacagattgccacaaacttagtggcttagcacaatgcatgtttattacctcacagtttctttgggtgaggagtccagtcacatttagctgggtcctttgcaaggcgctgtaatcaaggtgttggttagggccaaggtcttatcagaagctcaattagggaaggatctgcttccaagcccatgtgattgttgacagatttagttgctttcacatagccttctttataggtagttcacattcatgacagcttcttcaaagccagtaaggaagagagggtcttctggtaagaaggacattatattcttgtggaatgtaatcatacatacgctgtcacctttgccatattctgttggttagaaggaagtgataggtcatactcatactcaagcagggagaattacccaatggtttgaatacctggaggtgggaatcacagtggttaccttagagtctatctgggtttcacgtggagatgtgtggtaaaaagactgaaaataacattggatgtggagactagtagaaaggatagcagatagcagtgattatgctgtctgtgaaagttcaacttaagagctttagagtgtctttagacagttggtatgatatgattctcagtttcttactgagtccaaggaaagctgatagctgaaggaactgatgaagaaaggaagataaaaggatttaatagagaagtataggctgaaaaactcccaagcttgctatttgctaggagggagtctaggaattttatgtattcccctatagccaaagtgtgactagtagtcagccagccaatagaaatgtcttattttttgtatacatttttctcagctatgattcattctatagaaaagactggggcatagctctgatacttttaaataacggaaaatttcatgtcttactagttcaactattggaaagagactatagagacctcatgtttcgccctgagcccaaactcttgggggaaggggcagattacccagctagattagcttgctgaccccccatgattaagcagctatgacgcagaatggatcacttcatattaccagtattaataaagtagtagaaggtggtggtagtgatagtagtaacagtgatagcaattaatatttattgagcactgatggaatagtgattccttcatggggttagaaaagggtactgacattttacaaccctttcagtttacttatgggtttatagataaggaaacaaagacttaaaagggaagtaacttaggcatgctcacacagttagaatatagtggagtaagttttgcaaaaagataaaaagatggaggatagttagaaagagataatgaacataagaaaaatagagggccaacctaggtggtcctaggtgtttagttgaatacagtgcaccctaagctttttggcaccagggtctagtttcatggaagacagtctttccatagaattggttgggggatggttttgggattattcaagcacattatatttattgtgcactttatttctattattacattgtaatatgtaatgaaataattatacatttcaccataatgtcaaattagtgggagccctgagcttgtttacctgcagctaggttgtctcatccaggcatgatgggagacagtgacagatcatcaggcattagattctcataaggagcgcacaacctagatccctcatatgtgcagttggcgataggatttgctttcctatgagaatctcatgctgctactgatctgacaggaggcggagttcaggcggtagtgagagcaatggggagtggctggaaatacagatgaagcttcgctcactctctctcaccatcacctcctgctgtatggcctggttcataagagagcatgaactgggggggttagggacccctgatctaatagacagtattgtctattgattaagactgtgggttctggagccaggctttctggatttgaatcctggttttaccaaatactacctcaagccttaacctttctgagatttagtttcctcattgtaaaatggtaataatactacctacctaataggttgttatgagcattagatgagttggtgccttaaaaagtacttgttaaaacattaagtggcctggaatcagtttcaaattaaatatcaattctaatagaataatatattctggaaatagagcattgaggaagatggcagagagaaaattttccaagaaataatatcaaacacttccccaaactgaaaattgaaagggctcagtgaccaagtaatcagaacaaaggataaaaaaagccccacatgaaatttttgtatatcatagattaaaaaaaagattctgaaaactttccagaaaagaaagacaggaaacatataaaggactagaaatcagaatactggatttctcaatgcagttctggattctagaagaaagtaaagtagtgctgtcaaaattcagaaggaaatgttatctgcctgccgacaagcaaaaaaaataaatttttatacatgcaggaagtcaagaaaattcaactttttactttctcttaggacactaatagaggatgaggtccaggaaatgtgatccagcagtagagaagggaagtccaaggacttcagacttgtaggagacttgagcagtaaccaatataggttggaaccaaaagttggaagatctgggcctggcacggtggctcacgcctgtaatcccagcactttgggaggccgaggtgggcagatcacgaggtcaggagatcgagacaatcctggctaatacggtgaaaccccgtctctactaaaaatacaaaaaattagccaggcgtggtggtcagcgcctgtagtctcagctactcgggaggctgaggcaggagaatggcgtgaacccgggaggtggagcttgcagtgagccgagatggcgccagtgcactccagcctgggcgacagagcgagactccatctcaaaaaaaaaaagatggaagatccaagggaaaacgtagagtgaataaattatttgattatttgttgtatccaagaaatagtaatgataggcgtttaacagatctgttggaattctggaaatattagtggaatgtacttaaaattaaacaaatgaagaaacaaggcaatggttaactttagtaaaaacattgttcaagaaaaagtagactcatagtacacttgattcagcaatgaattacatgtatgtatatatgaatactggatattgatttaagcaaaatgttatatttaactctattttggggatgggagtgggatagaataataaaagaatgctgcctcatttgccctaagagcaagtctacaaataatatcttgactaataatagcaatataagcatattatttagcagtacacaaagtaaatgttataagagatggctaagagtttaaatttgttttctatagaaacagtatatgggagggggctaggaattgcagtttttgttataatctctaatagcatgtctttttttaaactgtccacatattaacattattttggatgatataaaataattttttaaaaatcgtgcatagataatgtacaagtgaaagagaagccagtgattttagcatacctctaaagaaaaaaaaaagcaaattcttactgaactgaattcctgagtagttatttcactaagtctctcagattgctagcctgctaaatgtagaaattcttgctgcctaatgcccttctctccaatggcagctgcctcttgttctgcgaggggaatagcagttgttaacacacagtagaacaaaacgattgtagtcagatgttaaccacatatttagtatactaatgcagtagaatgaaatgaaacaatagacaaaaatagcacaaatactgacttaacagaaacactggattgttgtgtacatccctacttcagggaggtgaagtgtgacttaggtagcttaaaaacaaactcattttgttgatgctgaatgatatcagaattaagttgagatttttctaagtgaaactacattgacagatacaggacaattgttaatgagatgagttgtaaatgtttgaagaatcaggtttgtttcagtttcctgcatggaaaggtaatcagatatttgaatgtgattggtcacttgggtctttagagaaagcgaatatttgaataaagtttatctcttaaaaatgtatctgttaaaaatgtttagactttgttgtgtatattttcattatggtcatatttagaagactgattttgattggaaggcttttacctagagaatattaccatattcaatatggaaaaccgtactgaacaacgtaaaacatgagatctttcaaactaagaaagatcaaagtgttcataattggaaatgtggaagtttttagggcattcacataacagattccaacttcactctgtagtcttaactccttgttcagtgcgtaggccaactgattttctcatctcctctgccaccctccccttctacctcttcccagccctagtactcccatgtgaaatcctcctgtatctttaaggttcagtcaggtatgtttttttcttacagtattttgtttgattctctgctagctgggagcgctcacctctgtttaactcctattgtgttaaattctctgttttatggttgttttttaatatcctttatctcatagaacaggagtggtatctttctctggattttctgtcttccagggtaccttatgcaggctaaatgcttacagagttttggattcagtttttatgtaaatagagattcagggctctataaaacagccctttctaaaagtaaattgttttaataggtttacagtcttacatgaatcctttctaccaaccccttagtgtggatggggcatttgtttagtcattcctgacaaatgacttttgatttttgtttttcagtcttacctccagtattagtgcctcgtcataatgaattcaatccacaacacagccttctggttcagtttaggaacctgagccacaatgaaccacacatgccacaaaatgccacgtttccagattctttccaccagcccaacaacactccttttcccttatctccaaacagcccttatcccccttctcctgctagcagcacatatcccaactccccagcaagttctggaccaggaagtccatttcagctcccaggtaagactttattttattgataccaaaaaaaaaaaaattcctaagaatcacagttgttcttactgtgggccctctgggtgaactgttacatgccaaggtataatagctgtttctgactctttattctttaggtaattgtttgatttccagaagagtttagattttattttgccaattaccgtatgtttaaaaaatggaagtagccctatttgacttaaatattttcttctattttatgacactcagtaccatttattgtcttttatataactgatactgtgatgaaagctatggcattcaatttaatcttcagaatgactatgtgagatagatattcctgttttacagatggaaaaagaaattctaaagtaaattttaaacttttaagtaccttacctagggtagggctaagaactagaggttcagacccaggtttgtctaactctaaagtctgtgatctttcacctttactgtgtggcttttcaaattatttaagactttagaagttaaaatgaatcctggttatctttagttagataactgatgaactgatttcactggagaaagataagtagattttgtaaagttctaaattttgttaatggcatgtcatatatggacatgtcagtatgtcactgtcaagaaatatttgaacacctgctgttgtcaggcagagtcatatataagtacagtaagtcctcacttgatgtcattgataacgtcttggaaactgactttaactgaaacagcatattacaaagccagttttatcataggctagttgatataaacaagagttaagttcttgtggtatatttctggtcacaaaaatatcactaaatttataaataaagacccaagactcttctaatattaaacattgaaataaatgtgagctgtgcatatctttaagaaagatcaataaaaacaagactgttatttacttaattattctaattcatggtcatgggtagccagagcacattccagcaactcagggcacaaggtggaaaccaatcctgaatgggacgtgattaaatcacagagtgcactcacacacaccccggcactcacactgggactgtttagacatgcatgccagttcatctgatgtgcacatctttgggatgtgagaggaaactcgggtaaccagagaaaactcaaacaaacatggggagaatgttcagactcacacagacgtggccctggctgggaatggattttttttctcatcagcatcataacaaaatgatgctgaacaaaacaccattgaacaaaacattattcaaggacctacagtatattctttgtgatttctctactgcagcaaaatatcaattggtatagttttttcttttgaagagaaattaagtgccagctgtttaacttgctattaggaatttgctcaaaaacaaattttcatagtttgtcttagattcagtgctaattgtagttctgtctcaaaatacatcctgtacaaaacattgggatgaaagacaaattcggttcttatttataattactgagacaaaaaagtatagctgtagcttttgcaaaattttcaactatgagtgttgaaactcaaagattttctagttaacatttagtttcctaagtgaattacctaaccatttaataggacacaacagccatatttggatgttgcacaagcgttagacaattgctgttagtgttgatggcaaattttgaagggacatagttttactttccagttttaaatgacagtatacagtatgtgctgatcttaataatttaaaagtgtctctgtagtagatatatacccaaatgaggaaaatctgtacttcagattgatatgtaatagctgtagtttctctgaacacataaaaataaaggcaaaattcttgaccttgaattctgtttcagtgaattttaggactgatccttgtatcctggattaccagggatctgggctaaataaatgtggatttgtagtaggttttcaattgccattaggtgtgctgtctgttctccttttcccttgccctaggatagtatcctacatttttttgtgtgtgatgttcagtaatgaagcttgctggtaatcttaagaattttctaaagcttttagagtaataattttgagcagaatgaagattttaattattattttttttcctcttagctgatacgcctcctcctgcctatatgccacctgatgatcagatgggtcaagataattcccagcctatggatacaagcaataatatgattcctcagattatgcccagtatatccagcaggggtaagagaagtactcacttcatttattttatagtagtagttgtttttaacttattggctacttttttaaaaacagctttattgaggtataatttatatgctataaaatttttttgttttaagtgtatgattcaaagattttggtaaatacaccaagttttgcaccacagtctaggtttagaatatttccctaactctttaaaaaggtttctctgcgtatttgcagtctatcctcactcctatcctcagctccacataccctctaatctgttttctgtacctgtagattttatcttttctgaacattttatataattggaatcatgtaataatgtagtcttctttcacttagcatgttttttcaaggttcatccgtgttgtagcatgtatcaatagtttgttcctttttattgcttaacagtactcctttatataaatatatcacatttattcaccagtcagtgggcatttgaattgtttccgtattttgattattataaacatttgcagctgggctcagtggctcacgcctgtaatcgtagcactttgggaggccaaggcgggtggatcccttgagatctggagttcaaaaccccagcctggccaatatggtgaaaccccgtctctactaaaaatacaataaaaataaaaaattacctgggtgtggtggcagatgcctgtaatcccagctactctggaggctgagacaggagaatcacttgaacccaggaggctgaggttgcagtgagctgagagtggagtgccactgcactccagtctgagcaacagagcgaggctccatctcaaaaaaacaaacaaaaatcgcatgtaagtctttttgtggatattgttttatttctcttggatagatatctaggagtgcaattgctgaataacatggtaagtttaactacttaagaaaactataaaacttctctgaagcggcagtaccattttacattctcaccagcaaagtatgagggttctattttctctgcatcctcctaacacctgttattgtctggctttttaattatagccattctagtgggtgtaaagtgcttattgtggttttaatttgcatttctctaatgagcaatgatgagcattttttaaatgtacttgttggccatttatatatcttctttgatgtgtttattttaaatcttttgcccattgggttgtcttactgagttgtaagaattttttgtatattctggatatgaatcctttatcagatatatgatttgcaaatattttctctcagtctgtggatttcttttcattttcttaatgacgtctttttgagggtaatagctttaaattttgatgaaatccattttgtcagttttttcatttctagattatgcttttggtgttgaattcaagaaatttttgtctatcccaaggtcatgaaaatattattttatgttttattttagaagttctatagttttagctcttatattaggtcagtggttccttttgagttaagtttgtatgtggtatatggtaaatgtctacattaagttttttgcatatagaaatccagttggctttgccatttgttgaaaagagtatcatttctttgttgaattaacatctttgtcagaaatcaattgactgtaaatgccagggtttatttcaggactctgttggcttacatatctatacctcatagtcttgattgctaaagctttcctataaaggtttttccccctatttttttgttgttttgttttatttttaatttttaaattatttatttattttagagacagagtcttgctctgtcatgtccagactggagtgcagtggcgtgatcatagctcactggagcctcagactcctgggctgaagtgctcctccaccttagcatcctgagtagctgggactacaggcatgcatcaccatgcttggccaatttttttgttgttgttgagatggagtcttacagtgttgcccaggctggccctgtttttttttgtttgtttgtttgtttttttatggcaaactatatataacataaattttaccatcttaactatttttaagtgtacagttcagtggcattaaatccatttataatgttgtgtgaccatcaccaccatccatttctatagctcttttcaccttgtagtattgaaactatacctgttaaataaaaatttcctattctccttttcccccagcccttggcaaccaccactctgctttctaatctctatgattttgaccactctaagtacttcatataaatggaatcatacaatttttttttttttttttttttttttttttttttttttgtgactggcttatttttcctcagggcacatccatattgtagcaatgtcagaatttcatttctttttaaggttgagtaatattccgttgtatgtatataccaaattttgtttatctattcatccattgatagacacttggattgctttcacttttttggctattgtgaataatactactgtggacatgggcgtacacatatctcttcgagatcctgctttcatttcttttgagtatataccagaagtacaattactggattacatggtaattatatttatacttttttgaggaacagccatactgttttccacagtggatgtaccattttatattctcagcaacagtgcacacggattccatattcttcacatcctcaccagcacttgttttctattttttagatattgaccattttaatgggtatgaagagatatctcactgtgggttgttctgtattttttttatctttttttttttttggataattgacaaatgaaaaattgtatatctttatggtgtcattgtggctttaatgccactttggtttgagaccttaacctccttagtttgtcccaagtttagaaatatgtactgctattttatacgtttcttaaaacaatgtgtttttatgtgttttctatgtttgtgataatactgaatgtgtgttatattgagtgctctgtattcctaagagcagttaaatttccagacccctaatagttttgttaatgtttctataatgtctagaatttatcaagaaatctcattatattaatttgcctataatttaaaatctaccttcatttaccataaaaatggaacatgaatttctggatttgaattcctgtttctctacttatttgctttgcaatgtaggtagtttttaaatctctaagcctgagattccccatttacaaaatagggatgatatgctggaattattaatatgttgattaaattagacaatacatgtaatgattttagcacacaacattaggccgtacacaataaatagtattatttttctccttttaaaaatatggactgtatttactccactttattctccttttgaaaatatggactgtatttactccacttaacctccttttcttttctcctgattttccagagatcatagtgccatttaatagtgttatatgttagatgtccattggaatgtaatttgtctcaaccaaacaactgagcccctttagaggaacttgatactcacattttctcacctttgtagatacctttttcactagaatttcttctcatttcagtcagattatgtgtattttctcctttctttttgccaaaaaagtgacaaaaagaaaatcaaagttaaacggcagtgcctggaaccacctgttagcaacaatacgtcttctgccttgagcagaggcagtgcttttctggttcctcttttccttttaaccaaaattgcctttttagtttcgcctagcatttttttttttctataaccttctgctcgttcttagctctaatcttcctgatgttactcttataacttcatgcaactcatttgtacctgtctttaggaatgggcctctacatgtataaactttgtataaactttaaaatctgagctcttaagacttctttgggcttacagtggtttattttcctctcttccttctcatctgcattctttgccattgaatactcagaattgatttattttcctctctttcttctcatctgaattctttgccatataaaactcagaattgagttttaaaagttaaactattctattaaaaaaatagttggctgggcgcagtggctcactcctgtaatcccagcactttgggaggccgaggcaggcagatcatctgaggctcaggagtttgagaccagcctggccaacatagtgaaatcccatctctactaaaatacaaaaattagccgggcttgctggtgggtgcttgtaatcccacctgctcgggaggctgaggctggagaatcacttgaacctgggaggtggaggttgcagtgagccgagatcatgctactgtgctcaatcatggatgacagagcgagattccatctcaaaaaaaaaaaaaaaaaagttaaccaattattttaaattgcctacatagaccatgtgattactcttacattttccttggtgttattttattcctgcccctttttttttgagacggaatctcgctctgccacccgggattgaatacagcggcacaattcgctcacagttctcctgcctcagcctccgactagctgggattatcatacgcatgtgccaccacacccggctaatttttgtatttttaatagagacggagtttcaccatgttggccaggttggtcttgaactcctgacctcacatgatctgcccaccttggcctcccaaagtgctgggattaccggtgtgagccaccgcacccagccatattcctgccttttttgaaagagaattgagggtctgtgatttctttgcttgatttcagctccaggaagggtgctgggatgtagagcttccatgtatctcttctaccctttgtgtctattatgagttactgacttttatattaatgagtttggccagtattttatattgtgtataaacctttttctgtaggcagttctggcatgtaaaatttaaacatatacctctatttacccaaagataatgttcatttagttgttttgtttttttgtttttctttataaatagactgcattttttagttcagtttttggttcacagcaaaattaagtggaaggtacagaaagttctcacatactctcttctcccacacaggcacagcctcctccattatcagcatctctcaccagagtgggacatttgttatagtcagtgagcttccattgacacatgattattatccagtggggttcattcttggttttgtacattctgtgggtttttaacacatgtatccacccttatgatatgatacagaatcattttttacctcttaaaaattctctgtgctctgcctgttcacctcttcttccccacaaccccttgcaaccactgatctttttactgtctctatagttttgccttttgcaaaatgtcatagttagaatcatacagtatgtagctttttcagactggcttctttcacttagtaatatgcatttaagtttctccatgtctttttatggcttgatagctcatttctttttagcatctctattagggttctctagagggacagaactaataggatatatgtaatatatatgaaagggagtttattaaggagaattgactcatgtgatcacaaggtaaagtcccacgataggccatctgcaagttgaggaacaaggaagccaggggtggatcagtccaagcccaaaacctcaaaagtagggaacctgacagtgcagccttcagtctgtggccaaaggctcaagagcccctggcaaaccactagtctaagtccaagagtccagaagctgaagaatttgagtctgatgtttgaggacaggaagcatccagcacaggagaaagatgaaggccggaagactcagcaagtctgctcttccatcttctgcctgcctgctttatcctagccacgctggcagctgattagatggtgcctacccagattgagggtgggcctgcctctcccagtccactgactcaaatgttaatctcctttggcgacacacccacagacacacccaagaaacaatactttgcatccttcaatccaattagtttgacactcaatactaaccatcacagcaccaaatactatttcattgtcttggttgtaccacagtttgtttatctgttcacctgctgaagaaccttttggttgcttctaagtttgagcaattatgagtaaagctggtataaacattcatgtgcagattttttatgtggatatagttttcatctcatttgaataagaagcatgattgccaaattttatggtaggagtatgtttaggtttgtaagaaacggccaaagtgccttctaaaatggctgtatcattttgcattcccaactatgaatgagaattcctgatgctcctcatccttaccaacatttgatgttgtcattgttttggattttggccattctaataggtgtgtagtagtatctcatagttgttttaatttgcaattccttaatgacataacatgttgaacatcttttcacatgcttacttgaccaatctgtgagtctgtggtgggctccctactcatatcttttgccatactttaatcagattgtttttgagttctttgtatattttgaattatagtcttttatcagatagaactttttcagattttttttttcctaatctgtggcttgtctcctcattctctagacaatgtctttctcagagcaaaagttttaaattttaatgaaggccagcttatcaattatttcttccatgaattgtacctaaaaaaaggcatcatcataccagaagtcatctagattttctcctgtattattttctaggagttttatagttttgcattttacatttaggtctgtaatccatcttgggtcaattttgtgaagagtgtaaggtctagtctagatttacttttttgatgtagctgtccagttgtttcctgtatcattttttgaaaagatttttttttcttccattgtattgtctttgctcctttgtcaaataccagttgactgtatttacttgggtctatttctaaactctattctgctcctttgatctgtttgtctgttcttttattttatcatgatcttgattactgtatctttatagtaagtcttaaagtgaagtagtgtcagtcctccgacttcattcttctcctttgatattgtgttggctattttgaggcttttacctccccatataaagtacagaatcattttgtctatatccaaaaaatagcttgcagggattttgattggcattattactctatagattaagctgggaaacactgctatcttgacgatattgagtcttattcttgaatgtgcagtatttctccatttatttagttctttgatttctttcatcagagttttgtagtcttcctcatagagcatgttcctatttttttatatttgtgcctaagtatttaattttggggatactaatgtaaattataatttttttattttaaatttcatttgtttattgttgctgtataggagagcaatcaacttttgcttattaaccttgtatcctgcaaccttgctataatgcttactagttccaggaattttttggtcagttctttcttatttttacatagacaatcatgtaatttgcaaacaaagacaatttcctcctttcctatctgtgtaccttttatttatttatggcattagcaaggacttccagtatgatgttgaaaagtgggagaggaggcatctttgctttgtttttgatcttagcagaaaaccttctagtttcctaccattaagtatgatgttagctgtagatgttccgtatcaagctgaggaagttcccctctattcctaatttgctgagtctcacttagttttttagtttaacttttttgtttaaaataattttacagatactgattatagttaaatccttcaggtctctgaaaaagaattttttgtctcaaatttaaacctgaattagtttatgttagaaaaacaattaaaaatgtgttgttgctgctatgttctgaattgtgtcgtcccaaaattcatgttttgaaccaaggcctgggcacctcctcactccacccagagggttgggagggtagaacatcaaaccaaagaggtttattctccagccttaaggcctaatgcaatttgctttgctaggttttcagcttccttgacccatcatcactcccttattttttgtttttccattttggaatgggaacgtctatcctgtgtctgtcccaccataagcacgtaacttacctggtttcataggtttacagctggaaaggaattttgcctcaagtctcgtatgtcatatgtagatgatatttggatgatactgggtttacaacattagagttgatgtggaaatgagttaagacttcaggggctgttgggatagaatatatgtgtgtattttacatgtaagaatgatgtgaattttgggttgctggggtggaatgctaatggaccatattgaatctccctaaaattcatatgttgaagtcctaactaccagtgtgatggtatttgaagatggaaataattaggcttgagagtgggattgtcataatgagattagttcccttataagaagaggaaaagaaacagatctttctctaagagcatgcactgaggaggggccatatgagcacacagtgagaaagcagctgtctgcaagccaggaagcaggtcctcactagttaccaaatcttctggcaccttgatcttggacttcccagcccccagacctgtgagaaataaatttctgttgtttaagccactcagccttacggtattttatagcctgagcaagctacgactattgccgatcctggtatttctataactttttaaattgtcatattcaagctgatttctagtgcttgttttcggatatagattcacagctaggaaggacagtgagacttgtgaaatatctgaaaattttctttttcatgtaatacttgggttgggttaaaagataaacacatggacaatctgagtttctgatatgtattaaactctttctgtgtctggtttgttcacagatgttcagcctgttgcctatgaagagcctaaacattggtgttcaatagtctactatgaattaaacaatcgtgttggagaagcttttcatgcatcttctactagtgtgttagtagatggattcacagatccttcaaataacaaaagtagattctgcttgggtttgttgtcaaatgttaatcgtaattcgacaattgaaaacactaggcgacatattggaaaaggtaatcttgtcattttcctacatttaatcgaattcaatcatttgttgtacttgccatgaaccatgcattgtgaaaggtgctagaaacatacaaagaagtttgacacgtggcctctgccttaagttgccgatattgaagaatgtattaatcaaataaagacatgatgttccctcatttttttgtcctgcttagtgtttcttcccagtgctaaggatctgaaatcatactaccactttgttttttgagtgttaccctgactggaacataagctgtacaggaacttgctttgttcacagcagtatccccagtagctagaagagtgcctcattgtaaatacacaacacatatttatggaatattgtgtatgaatgctggtgaaggattagaattttataattaaggtatttgtggagtattttgggttgagatgacttgtaagtgttaccatgatgtgagaggagcggaattagaaatgggaaatctagtgtgaatgatactccagtggcttcaccaccactgctcccatcttttaaatttaggcaataaggttttattaataattcatcctgcagatagttgccataacaaaccgggcccttttcatactgcaataaaatgtcaaagtctcatgcatcaagtgatcaggaaggaaacccatcccaggtaaagtgtattgcctgtttcttgagaagttttgtttttaccccttgctgcattttgcttctttaacttgagggcatcttggtccaaaataggaataaaaggtaaataaatataattgtgataggatttcttatagaagtgattcaaaaaaatcctgcggccaaaaataagttacgaaacaaagttttcattgtcttgagtttactgccaacttgccttagttttttcagtgaagtgcctcacttctaggcattgattttttttttcttccatcacagtagaagtaatttaagggaaatctattttgtgaattttgaaattctagaatcagttttttctttttccccagcatatagttctaggaccttttctttcatgggttagttttggggtggtggagggatatgttgggaaaatactaggtgactagctttagttatataatttgaatatttaatgttaaaactatttccacatatttatatatttttaaaatttttattttttttgccctcacatcttgcaaaggaacatatatatttttaaatataaaaaaattttaagtaagataaatctgccatttcaaagctcttcttatgacctgaaattatatatgtaactttggtttttttttagtgttgctgtcctctttgttagcacaaagagtgcaaaagtctgtcaaatgactgtttatgatagttgatagcactgaggatttatttgaaaggactcatcaaaagatgatttggggttttttttttttagccctctctttctctcatagagatgataaatgattgttgggaaaggaaaaagagaacaacctaaaaatggataacttaatctgctgcctatttgaggcttctcttgtagatgcaggcagacattaacctcttgattatctttggcagcagaaggccatctagtggtaacttctgtctaaagactgctggaagtttgctgtggattaatgggtacttttgttgcaccatacagtctatttggtttcattgtaatgattcttttagctgactcttgtgatgtttgtctttttaaggtgttcatctgtactatgttggtggagaggtgtatgcggaatgcctcagtgacagcagcatatttgtacagagtaggaactgcaactttcatcatggctttcatcccaccactgtctgtaagattcccagcagctgcagcctcaaaatttttaacaatcaggagtttgctcagcttctggctcaatctgtcaaccatgggtttgaggcagtatatgagctcaccaaaatgtgtaccattcggatgagttttgtcaaggtgagttgtgacctctaacataatttgagtcactataaatgtgtatattatgactttaggttataatttttaaaaattgttaaatgaaagttgataattgcttttggcctgatttaacaggtttttaaataaaattattgaatttgtaattttaactacataatagatctaagatttcattttgtaatctagacattataaaatgcatgattgatattgattttgatattgaataggggctgagattataaggaattttagttaaaagactaaatttctagaaagcatttgtattagtccattttcatgctgctaatagacatactcaagactgggtaatttatgaagaaaaagaggtttaatgaactcacagttccacgtggctggggaagcctcacaatcatggcggaaggtgaaggaggagcaaagtcatatcttacatggcggcaggcaagagagaatgagagccaaatgaaaggggaaaccccttataaaactatcggatcttatgagactttattcactactgtgagaacagtatgggggaaactgcccccatgattcagttatctcccactgggtcctttccacaacatgtgggaattatgggagctacaatttaagatgagatttgggtgaggacacagccaaatcatatcagcatttaatattaaaattgctatttgagtctcttaacttcaacagttttgattattattactagatttcattagggtgacttggcagaattctttagaatactaaaattatttcattcctagctaagtactgttattaaaagtaatggcagaagccacaattacttttccaccaaccttaatattaaggatttgcaaagttcaaaggaacttttcaagtttttcatctactctcttcacctgactgtattgacattccaaagatttgtgcttaaaatctgaaaagaattttagtcatgtatttaagcaatctgtactgtatctacatatttaagcaatctgtactgtatctacatggttcttaagaatttagcacaagaagagcacctgtcacacgctgtgcatgggtttttttctttttggtattcagccccagtccagtgttttcatgatactttgctgtagatctattgtatacatcagtttactggttaccctgaaggtatttctgccttcttgtacagtaatgtgacttttgcatatttattttaatctccactccccaatgttcttcactcccctgaccgccctccctccccaacccagttttcctgggccaagactaccataagcagtaaaccagagaacctgataaatccaggaaaataaaagtgaaaaatttctatttcaatttttatctgcagttttaggctaaagatttcagctcagttcatcccagtaatttccaaccttaaaggataatcactatgtgactgccacattaaattatacatgcatgtattgatcaatatctacaatgccttatctgatattcaaacaacttgaaaataaaaaatttttcgttaaaaaaaaaaacctgggccgggtgaggtggctcacacctgtaatcccagcactttgggaggccaaggcaggtggatcacctgagatcaggagttcgagaccagcctagccaacatggtgaaaccctgtctctactaaaaaatacaaaaattagccgggcatggtggtgggtgcctgtaatcccagctactagggaggctgagacaggagaattgtttgaacctgggaggcggaggttgcagttagccaagattgcgccattgcattccagcctgggcaacaagagagaaactctgtctcacaaaaaaaaaaaaaaaaaaaaaaaaaagaaactctgacatgtgacatgatcttacatgaggctatttatgattttgattttgattttttatatatgattcctttattagtatttaagtgacatctctttacattttttagtggtttctccaggaattaccacgttatctttaacataccccaatctacctagagttaatattgtactatttttagaatgtaaaatatgaaaaccttgctgttgaagagttttaattaccttcttttattctttgtgctattcataaattttacatctgcacattatatcttataatacagttaaaatttttcctttaaatagtcattaagtcttacaaagaaattaagagaaaatggtatttataaatatttgcaggcagattctttggggctatgtaaatacactgtttctcctttatattttacccacaatttttgcattcttcaatatatcttgtctacagtaattattactgtggtgttctagtggtgattttctattttgcatttatcccattaagggagaatgtatctcagatcagaaatatttgttttaattatgagatactgtactgtgttacctttctaagattaaaaaaaattatgaactataactggctctaagggtttcttttaagggaattatatattattttagaattcatgaatctttaaataatgtagctgttgtcttttaatttcatggtgaatactaagactggttttgtgatagttattctctttatgtaacttctacatatctctactgttaaaagctatctttttcttatggtaaaattggtttagagtggttgacagtttaaagagggatttgtgatgatatctgttcattttcatagggttggggagcagaatatcaccggcaggatgtaaccagcaccccatgttggattgagattcatcttcatgggcctcttcagtggctggataaagtccttactcagatgggctcccctctgaaccccatatcttctgtttcataatgcagaagtattcttttcaattatattgttagtggacttgttttaattttagagaaactttgagtacagatactgtgagcttacattgaaaacagatattacagcttatttttttctacataattgtgaccaatacatttgtattttgtgatgaatctacatttgtttgtattcatgttcatgtgattaactcttagaagtgttgtaaaagatgcagagtaagtattatgccccagttcagaaatttggcattgatcttaaactggaacatgcttttactttattgccctaacaattttttattaaatttatttgaaaatgcatcacatgatgaaaaattatagtagcttataagagggcatatacagtgaagagtaagttttccctcctactctcgatcttccagaagctgtacttttaccagtttctttgtcccaccaacttaaaaaaaaaaagtacaattcattgttttgcaaaagtgtatggtaggggcttaaaagaaactataaagttttatttgaatgaacactatgcactgctgtaactggtagtgttcagtaaaagcaaaatgatagttttctagatgacataaaatttacatttaatacagataagtgttcttcagtgtaatgtgacttcatgctatatatcttttgtaagacatttccttttttaaaaaaatttttgcaaataactgatctcaagtatatgtcatttactcaaaatctgtcataagcattactttatagctagtgacagtgcatgcacagccttgttcaactatgtttgctgcttttggacaatgttgcaagaactctatttttgacatgcattaatcttttattttgcacttttatgggtgacagtttttagcataacctttgataaaatacactcaagtgacttggacttagatgcttatccttacgtccttggtaccttttttgtattaacaaacactgcaatttatagattacatttgtaggaagttatgcttttttctggtttttgttttactttcaacctaggttataagactgttattctatagctccaacttaaggtgcctttttaattccctacagttttatgggtgttatcagtgctggagaatcatgtagttaatcccattgctcttacaagtgtcagcttacttgtatcagcctccctacgcaaggacctatgcactggagccgtaggaggctcttcagttgggccccaaggataaggctactgatttgatactaaatgaatcagcagtggatgtagggatagctgattttaaaacactcggctgggcacagtggctcacacctgtaatcccagcactttgggaggctgaggcaggcagatcatgatgtcaggagtttgagaccagcctggccaatatggtgaaaccctgtctctacaaaaaatacaaaaattagctgggcatggtggtgcgtgcctgaagtcccagctactcgggaagctgaggcagaagaatcacttgaacctgggaggcggaggttgtggtgagccgagatcgcaccactgcactccagcctgggcgacagagcgagactctgcctcaaaaaacaaaacaaaacaaaacactcacccatcaacgaatatagactcttctctcatttatcgatgatcctctttttccattttttaagtacttatgtggaagctagtctcccaaaacacaatctttagagagaaaagacatgaacgaactccaaaatatccatttaatcaatcatgtttttggctttggataaagaactttgaaccagtttttttctcaggagctgtcaaatggacacttaattatgacatgagaatgaagaaattattttggaaaaaaaaaatgacctaatttacctatcagtgaaagctttattttctggtgccttttgaaagtatatggagtcatatcattcttctgtttaaaatgttagtttggtttgactttccactttgtcctttctgctcttgtgaagaaaaaaaaaagcattttcgaggaaagaattatgcaatttcttttgttttctgtgtcattatttattgctttttcaatgtgcagccagtggatggttttagttctttcagatgaactgccatttgtgtttcagctcacagttctttgctgggtaaaagaaatactttctgacagtcacctgagccttaaatgtaagtattacatgacatgcattctgtttcttccagagttctgtctgccacacgaaagagaatatttgcttacttgatagaactttggcattttcatcattcttttacttaaccaggcttatggcatgatctctggaacaaatttgtaggaaaaaattactccaattgaatgactgatgtatgtaatcaacttcattgggctgcagtaaactagtggaaattagagagttgttttattggtgttttctactgtgagttaattaaaaattgtttttatttggggtcattatgtcacagtcttgagttaacaagatcttacgtgattggccttttctttgttttctcttaggagttgtgtctcatgaatgacagtactaaagctattaacaactaagagtttgacagagaactataagcctgttgtatctcctaaaagttgtcaactccccacccttggactttaaatgaaaattttattcagtccagctattcttacagtccctaaggattttcatatatctatgtataggagataaaatttgctagtaagatttttaaaaactggctagtgaaaggaaagtacctctgaaagaaaccattttagcaaattatggttatatgttttaatttaatctacagaatgttttatagtaaaattctagcaccactagaataatcacatagcatgtacaatatatttatgctggctgaaaagacagaatctgggaataataaaattgcaaccagtttggtaatgcaaacagcagaatagaatgaaatctcagtaatgaattaaagcaacaaaaagatattgattggcaaaaagcaagatataagagattcatttgcttaacatttctacataatatttatggtctggtcagtattggtctggtcagtattgcctggctgacgtgaaatgtaaactagtaggcgtgttattgatctgctaaaactaaccctctttttaagaggagatttaaggaagacgtcaatcaaaatgtcaaatatgtgtgtcagaatataaataatttttcacattgtattgttgctatataaaaaaaataatagaattggttgggtttctgaggtgaaatccagagtaagagtactagacagttcaacaagccacatctaatggcacagatagaggatgtagctattttatacctttcataacatttgagagtaagatatccttcaggatgtgaagtgattattaagtactcatacctgaaatctgttgtcaagattagaactggggttcatgttaaaaaccttccatattacctgagggtacctgtggggaacagttccttcccctgtgtggtagtattttgttggaagagaatgtttatacaaaaaatgaaattcttccaacagcagagaaactctaaaaagtttgatagtacctatcaaagtgctgtacttctgtgatagagaacatctgatgtaccaatttagatctatttctttatactttttctaatcaattgcttaatagtactttggatgattatcacctttgccacttaaaatatataaatatcctttttacttcatgaggaaggaagaattttttgataattactgagttcagccttttgtgatgacttatattttggacttacattttaactttaaagaatgtcagatcccttctttgtcttactagttaaatcctcacctaatctcttgggtatgaatataaatgtgtgtcatcgttatattgttcagctagatgagcaagtatcttagggtagtaggtagcctggtggttttagaagtgtttggtgatttttatggagagagttttcctaagtggtggtttataggtggtatcagatattattagggcagctttttggggagtaatctcaggtctcccagagcagcagcatttttctcattgatataagtaagattcttaggagcttttcttatcacacaagatgcctgaatcgaatgtgagaattgaaggcatttcttctgcataaacaaagaattctacctgctggacagaaacctggaaagttctttggaattcgctgaattacagtttagtatgtcctgattacagagtgacaatatttatcaagcctttgttatattggattatcttctctcttaaaatacaactgtattataattgaaatgacagcccaaaattggatggtttaccaaaaccaatgaaagggatttcacacatcaatttttatttctgttttgaagagcacatgctatataataattgctagtagcaactgcagtaaaacaggtgataagttattttctctgaaaagatccagtcctagagcaggattcttcgatcattcatggcagagtgaaaaaggtttgtatggttcttgtccaaataactcagttcttaaaattcttaaaatgatcgtaaaccattatcctttaaaggtttatttgaagatgctgttaaagtacagaattttgtgtacaggtagatttttccgtccctcattaatagtgccttcttaattaatacagactggtgttagctataacaaaactccagtaaggccaaagaatcccaagttctttgtggaaaaaaaaaaaaaatcttttagggtcagattttcccttctaatatcattgaagatgatgttgcattgatttattcataaagtattttaactataggaactctagaagataatggttaggcaagtgattttttttttaaatatggttggcgtaagttgtattttgaaattcacttattttaaaatcgaagaggattgtaatcatggaaatagaatgtttgtatctacctgcccacattttcttaaaaagatatttcatatacagataatgaagaccaagctagtggctgcactgtaggtctgctgcttatttgtatttgttgtgcttctgtttatgttgtagaagctgaaattctagcaacatgcttcaattctgttattttgatacttatgaaaatgtattaggttttactatattgtgcttttgaaagccataactcttaagaactttgtttttgcatattgtttgctaattctttactttaataaacctcaaaacctgcttaatgtgtctttttttgttttggctctggagttggcctgcctgcgtttgagtcatgggcctcatagcttagacaagttgcttaaccactctatgcctcactttcctgacctgtaaaggaaaagtctacttcataggaaggatttgagggaagattaattgaagtgtaatacaaatacagtatttagaacagtacttagaacataagaactcaaatattaaaattgttactatcttttacatttccactagttctttgattcagaataattacttcttatgttgcttgacctcggtgtatcaacctttgatgatccactttgtgaatttacaattttttatttccttttgtcttcttttttgaaaaaattttaaatcacagactgactttgcatcattgtcactgtgttgcacacttttaccaacctctgaattacatatacaagacatgcaaactcattctaattagaaaggaatggtgagcgaggcacagtggctcaggcctgtaatcccagctttttgggaggctgaggcaggtggatcacctaaggtcaggaattcaagagaagcctggccaacatggtgaaaccccgtctctactaaaaatccaaaaattagccgggtgtggtggcgcgtgcctgtaatcccagctacttgggaggctgaagacaggagaatcgctcgaacccaggaggtggaggttgcactgagccaagatcatgccattgtactgcagcctgggcaacaagcgatactgcgtctcaaaaaaaaaaaaaaaaaaaaaaaaggaatggtgaaaaatcatgtgcccttgccagaaatgtagaaaaacccaaactacatattaaccctaaaggataaagataaaagcacttgttctttttttttttttttttttttttaatagataaaaaagactctattcaagcttgtccagcctgcacacatgggctgcatgtggtccaggacagctttgaatacggcccaacacaaattggtaaattttcttaaagcattatgagattgttttgcgagttttttttcttttttttagctcatcagctatcgttagtgttagtgtgttttatgtgtggcccaagataattatacttcactgtggcctagggaagccaaaagattggacattcctaccaatttctgagaatcagttccttcctatgtctttttacttaaaaggcattttgtaaggtattttgtagcaacatcactggttgttttagaagtgtattttttaaaaaagcacacttgtcctagcggaagaaggttcagtgagcactaagaggatgttggcttctcttgggtttaagataattagttttcaggttgctgtagccaaaacagttcaggtgatgaggggttgggacagtggctaatactattttgtattacagcagttttgatgcagctatcgttttataaacatttttaagattgtcagtagactgcagcaatgcttataaggaagatttatttagagctctgtagtatttatgattgaaagaaggaagcatttttaaaacacccttcccatttaacattttaaatattactgatttttgtcattgagtttgtaagtctatcataagctttgcaaaaacaaaacttgttctttctatctaaatcagtttttctgtttaaaaaaagggtaatggggctatagggaaaattcaaagaagagctatgggcagcttgcttaaccatctccatgttaacgtatgttggatgggaggtgggaagagggatttagactggtggtgaagacttatccatattatatcaaatgggtgtgtgtataattcctagtgagagattttctgaggcagtttattgatgtttagagatggattttgaaaagatccttatactttgtcttaatcagttaccccttcccatctaataaacctccttcattatttcattttaaataatactttcatttgagataaatgctgagaattttaacagaaaagttaaaactgaaacccccaaaccagtagcaaaggtttatgagtgtgcccttctaacctgttctggtagtcactgtacattgatccttggctttctttgacagatactttgctgattatagatggagctctagctctttttgaaagggttctcagagaaattggtttggttctaaagtgtttcttgagttctttgtacctaagaaagcctttcattctgcatagcgtttatcaccatccaacatatatatttctttaccctgtttattgactgtcttacctcatgggaatgtaagatctgtgaggacagacctgtgttgccactgctagaacagttcttgatatgttataagtaagcataccaatatttgttgaatgaatgagagtactgaagcaagaagtgaattttttaagtattagaatttaccttttaaataatgtaatatttacttcttagttgaattgcttctagctcaatgttttattagctctctttatgcctgagaagtggtttgatgtggggtggggtattgtgggagctggctaaagtataattgagaagaaggggaaattcagctaagaaagcactcatatcctttctctttgaacttttggacttttgctccaaagttatcaaattcttggaattgttgcttgtagaacctgcaaaattaatagtcaagttagagctttaacctgttaacatttaatattttcccaaagaaagtaggaagggcatagtttccttgatacgcttgacaagagaaaataaccccaaaaagtgtacttttaattacacagcttacagaagctggggtgttacaaattttgtagtgtgattttagtgccctggtttagaccccataatatccttccctaactgttgtacataaggggcaagcctttcattgcactcaggtgggagtgggagcaaggaatacctttgagagagagaacgtatgataaaacaaatacatgaaccatatttgtgcttcagaataaaagattaattttgctgaagagtgtgtgtgggtgatgtagggggagaagttcaggaagaagaaacaacagggtctagagggttttttagattttgtccactttatagttttgccaacattagttcagaagtgtaattaacagtaaactttccctaattgccttttgtttacataaaattttgtgaaatgtggttttcattaacttagaattgtttagaccaagttagtgaattcagtgaaggtgaagaatgcaggcacaaactagtaatgtgtaactagtaaggctggagagatgatgttcatatgaaaagaaggtcctttccttttattgtctgtttaataacctgctgtaagcttaccaatgcccatttgccctttcattgcagaacacctgtgtccagctggataccacgtttcctagctttttttcagctaggtatggtcatgtgactaagcttggccagtaggatattagcagaagtgataggcaccacttctgcattatatctggaagaggaatgcaccccttgctcttttccccttctcagtggctggaatgcagatatgaaggcaggatctagcatagataccttgaagtggacatggaagccgagggatgaggatgacagttgtgctacccctgaaagagtactgtgctacacctgaaagagtactgtgagaaagaaacttgcgtggcggatggctttgttatagcagtttggactgtaacctaattaatacttacttgccaattgagtgattaacacaggtccaactttatggtaggcagggcagtagggctggaatcattgttcttgtcctcatggaaagtgaagctgtaacagagtagttccgagttcattaggttaatcagttttggagggtggagaagcaggacccacaaatgagggttattttaaactatagactctacttctgtgtttctgaatatttttattttttctggccctgagccgtatgagcttgttcattcatttgactaatatttgagggcttgttagatgtcaggctgaggaataagagtggttaaaacaaaaattctttcccttaaggatcttcattctggttaatgaagacagcaaacaaggtaaataaaatatatggtgtgtttactagtaagttccaaagagaaaaaaataaagcaggaaaggaatataccagggttggggaacaaggtggaattataattttagatatagtagccagggaaggtttcactgagtaaataatctttgatcgaagtccaggaagatgaggaagttgttacgtgaagcagtgatttaaccagttcttattcaaggcaattcagaaggcatgtgaatgttactgcaatgatctgtgcttttctgcagaaaatgaataattcaagcagaaatagctaaaggtacaaacttctattaaattgcttgttctttagtctctgcaggagatatagtaataactgaagtgttacacaggtggagacgggaaacgttagttgctaagaactttggattaccaccgctaggaaaccagccacttggaagaccaatcaataaaggagtgttcaactcaatatttcacctgatacaaggttagtttaaggtggaaaatcaaaggatatgtgctccgatgtaaatacaccttttaaatttactttagctctgttttccctctgtatttcattcaataaatatttattgcctattttctgtttaaaactatgctaggcattgggaaacagcagtgaacaggacacatgttgtccctgttctctgttcatacaacttacatgttactagtgggaagaagcattgggctactaattatgcagttatttagtagctgtgattggggaggcaatatggggtcatgagaggattaatcttacctgaggatttaggcaagtcctttttgaggaagaaacatttaactggagacctgaaggatgagaaggcatcagccagaggaaggaggagaaacaaacagcttaggcagaggtagggattgaaaggccactggagtgtaagaggagtgagagaagatgaggctggtgggaccagttgattctggtccttattaggcttttgtgtttaatcctgagagcaaagagaagccattggtgtatatgctggggctggcggcagatgtgtttattgagtgaggagagacaaaaatggaagtagggctttgagttagggttgtgatggtggacatagacaggagtagatggagtagagtggtgcctagggggtgatgagttacatattgaaggatgaggaagagtttagggtcaagaatgaccaccatgcattttttactttgggcagccatacgctggtgcagtctattcagatgaagactgaaggaggatctaatttagacagatgagttttaggcttgttgagttcgaagtttcccatgagatacccaaatggaggtgttgagtgggctcagggatagtgtggagagagtcatctgaaaagcaactgaagccatgagagcgaatgagatagtttagggggaaggtgcaaagtgagaaaagacccagaatagctgtcctccaactctgggcatacctgttgggaagtacagacctctttactgtttcctgatagcacatggctgaaaaaggacaggtcactgacaaaaagtagtttgtaccactgcatgcacttctgaaatggccatcctggttaataatgatagctcacattcagggcatttactacatagcaaacatgagctgaacactttactgataatgtttcactccatattgaaaatcctttgaagaaggtattgtcatctctattctacagatgatgaaacgggctatcagaaatacagaaataacgatgaaggcatggagtggatgatcaagctcaggtcattggctccagaactcagactcttggtcaccactatgctacctctccttgactcctagcatctgcagctacctccccaccgtgatctccagcctctcccccaacccccaccaacaaaaatgcgttaacctcaacccttctggctgctcactgtggctggttatagcagaggaacccaaacacctgtgacatgggccctattcctgtttttagcctgccatgccctgctctccaaaggtggtttcaagacatcttggaactggtgggagggcaaagggcaggaggatgtgtatgcacaggtctacacccagacagtcatctctcttagtttgggctgcttccatagactgggtggcttaaacagaaatttattttctcacagttccgtaagctagaagtcctccaagattcgagttccggctgagtcggtttctagtgagggccctcttcctagtttgcagataaccatcttctcaccgtgtcctcacatggccttttctccgtgcctgcgcctggccagagttgagagcaatctgtggtcccacaaggacactaatcctatcagaacagggctccacccttatgatttcatataactttactttcttactctaaatacagccactctgggggttagggcttcaacatatgaattttgggaagacatatgcattcaattttaacaccacctaaatatccaatcaccatgttgtagtccacttattctaaatatt

SEQ ID NO: 30 - DNA, 81821 bp, Homo sapiens
gcaaagcgtcctgagctccctgtttggcccggcagagcgacccccgactttgtgcaaggagcgtagagcccctagtgcagtcacggaagatccgctaccccaacatatccgccgccccctgctcctcagaggctcaaccctggaaggcacacatgcacacccatttttattagcctaccctaggatgggggtttggaacaactttaaagtgcaaagtgtgtttgtaagtttgtgcacaagccagggagaggcaaagcgccccgtttgcgtccgagtctcagtgggtccgccgagccttgcgcgcctgctcgtggctcgtgtaaccctgtgtgtgtgtgtgtgtgtgtccgcgcgcgcgtgtgtgctcgctcgcatccgtgctctgggcgcaacgcgaggcagaaagcgggccgcgggcgctgtcaggccctgggcgggggtgccggggtggtgtggggcgggggcccgagctcggcccgccccgggagccggccccttggagcctccggccctgcaatgggacgtgttctcctttaagagttaagaaacttgaaaccttgtttgcgcaacaatcagcgccgcggagccgccaaagtgtctagactggcatatgatgggaggcagccaatgactccgcggcgctcctccgggggccctcagtgtgcgtttgaggagaacaaaaaagagagagagagccgagcgggggagcgatcgagggagctgagccgagagaaagagccgccgggcgctgcctcgccagacctcgctgggaccccggggccaccgggaggcacttttgtggaggggggagggggggcgacctcggcagcctcggcgcacgaagcgtccgagggcagcgtggggcgggctgcgacctctgcatcggtggactgcatttttaattaaggattcccagcagctctttgggatttttacagcttccactcatgtgttgacacccgcgtccaggagaaactcgctccaagtgcatctagcgcctgggacctgagacggcgttggcctttcgtgcatgcaaatccagggatttaggttttgtttgggatttccttttctttctttccttttttttttctttttgcagggagtaagaagggagctgggggtatcaacaagcctgcctttcggatcctgcgggaaaagcccatgtagttaagcgctttggtttaaaaaaaaggcaaggtaaaggcagggctttccagacacatttaggggttcgcgcgagcgctttgtgctcatggaccagccgcacaacttttgaaggctcgccggcccatgtggggtctttctggcggcgcgccgcctgcagcccccctaaagcgcgggggctggagttgttgagcagccccgccgctgtggtccatgtagccgctggccgcgcgcggactgcggctcggcgtgcgcgtgttcccggccgtcccgcctcggcgagctccctcatgttgtcgccctgcggcgccccttcgacgacaggctgtgcgcggtctgcacggcgctccgcggcggagcttcatgtggggctgcgacccgcgcagccggcgcctcgctgagggaacggacccccggtaaccggagaccgcctcccccccacccctggcgccaaaggatatcgtatgttcaggtccaaacgctcggggctggtgcggcgactttggcgaagtcgtgtggtccccgaccgggaggaaggcggcagcggcggcggcggtggcggcgacgaggatgggagcttgggcagccgagctgagccggccccgcgggcaagagagggcggaggctgcggccgctccgaagtccgcccggtagccccgcggcggccccgggacgcagtgggacagcgaggcgcccagggcgcggggaggcgccggcgcgcagggggccccccgaggcccatgtcggagccaggggccggcgctgggagctccctgctggacgtggcggagccgggaggcccgggctggctgcccgagagtgactgcgagacggtgacctgctgtctcttttcggagcgggacgccgccggcgcgccccgggacgccagcgaccccctggccggggcggccctggagccggcgggcggcgggcggagtcgcgaagcgcgctcgcggctgctgctgctggagcaggaactcaaaaccgtcacgtactcgctgctgaagcggctcaaggagcgctcgctggacacgctgctggaggcggtggagtcccgcggcggcgtgccgggcggctgcgtgctggtgccgcgcgccgacctccgcctgggcggccagcccgcgccgccgcagctgctgctcggccgcctctttcgctggcccgacctgcagcacgccgtggagctgaagcccctgtgcggctgccacagcttcgccgccgccgccgacggccctaccgtgtgctgcaacccctaccacttcagccggctctgcgggcccggtgagcgcgctgcgccggccgggggggccccgggtccccgtccccatccccttccgtgcccttctctctgtgacactgcgggtcggcgcagctgcgggtgctcccccgggtgcccttggagcgtgggagccaccaggggaggcgcctcagaccggccgaggggagtgggtgtcccagcacacacatcaagtggcaactttatctcaaggctccggtaaacttaaaagggtacatgtcgtagttttctctgtgcagtttcagggacatgatgtaggctccaacttcataggcagtgaaaggggagggcaggccaaggagagaccaaagaagtaggtgctatttcctcctacctcaattccggaatctaccccagtctgtgcccaggcttctagcatttgtatgcacgtgcccttacccacactgtgcttttctatgtccaagtagctgtaagttgtgaaattgggtgtacacaaatcatagctagaatcaaaagtgttcgtcaaatgtccaatttgtgcctttgcatactttcgacaaagctttgcagggtaacccctctctggagtaaagagcaccctctttattccccacataatatcattccccacatcccttgggtgtcaagtgccagggtcttccatagtccttctcaagttttgtgttcagcttttgtatagagtttagggtcttggaggcatccgtgagtagatgaagaagccagatactggattacctctgagaactgccccccttctttgttctcctcttgggatttcctgcacacgccccaccctcagccttgcttacctggccaggccctggtgctcaggtgcagacaggcagaggccccagcaggtcaggaggctccagcaggccaggagcttgcagctgccttgctctgacctctgtcttgtggggaacacacactttagcctgtagctagcctctgagggatgtatgggaatccattagctggcactggggttttgcaggggtgggactggcagggagtcacaggctcttgagcctgggagggctctgaatccctccattctggcttccctggggagagtcagcacccaggctgggagcacagagagggtcaggttgtaggtctcctgactctgtgtggaaggggaaagtgggtctaggatggtgcatttgtcctaggtgttttgtttgagtgtggagtagtgtctggagaggaaaggaagtttcccctcagtgatgattcctgcatagagggcattgatgggggcaggtggggaggggaagtgttgatgaggcaccctactcccctcatggtcactccagtcccaatttaggagctatgagcagcccctgatctgtggctcatgccaggctttctatgtactcttttccccttactgacagctttccctggaagtgactttctcccctctgccaactgactccccactgcctctggggaaggagaccagtatttatggttgtcttgttcctggtgatttttttttttttaaagtaggtcccttccactctcgtagaagcccctggcaggtgtattctctttcgccacttcagtgtgcagcagatgtttgttgagcaattactttgggccaggcactgtgctgggtgctgtggctaacagagtggaaatatgagtaggatctatgccctcaagaaacataatcccaccagggatttatgggggagagatgggggaagaagggaagtgtgcagggccaggtcattgggtgtgaactaccagaaggctgtgggtgtgtatgtaataggatggcatgcaggagctccacagctccaacctggagccggaccttggaggatgggtcagaggagagggagccagccgggtcagaggagagggagccagccagctcagagtcaaggtgccaggcacgttcaggtggttgggcagggaggggaggagtgaaaaagttggagacgatggacaggaccactcctgctactactcctgggactaggagttggcttgggtgttggtttgcatttggtaggtttggagaggtacaggtcaagagatacctggcaagctgcagtagaacagttcttgaccatggacctggtcccaggctctgcccagctagtaacgtgcagcttgactttggatgagttacctcccttctcagccaccgtgctggtcagtgggggtggctctaggaatattctccccatctaaatctggactaagccttgggacttgattcccctccttctcccagaaggaggcgctgttgccagggctgcagcaccccaagtctcctcccttttctttgctagctgctagcctgtggggcccccattcagccaccctggggacagctgggaggaccgatggtccgggaagagtttccagtatgtgccaggttgatcctcttgcccctggcctgagagctgggggagccctgggctgcccacccgcctccaccgcttggccgccagcttggctcccgtaactgggcgggcgcatagctggggctcagcggtgcgcgtcctgataaggagactgcgccttccagggctctgggaagagggccggggcaccgggcagacagatgcgcgcacacacatagcgcaggcacaccgctagcgagcaaagtacactggaacaccggcactgagggactcccacctggcagcagtcacctccgcaccttcaccgaccactgcagggagccccggtgacagaagaccccttcctgggcagtgtggacccctgctgttcagagcccactctccatcaacttgagttgtggccttggggctagtttcctctttgggcttcttttcctatatctaaagtaaagggttggagggaatctgcacaatctgagggctgatgtgcagattccaggccacacaggcctccgtcccctcccccactctgccccaggcttgtctcggaaactggggtcctcaggaggggacccacctcttctgggcatgggctaggggcctcctggcctcccagcccgtgggagtcaggcccaactctgcctcccccttgggtgtctttctgtcccaggaaaagccagttcgctgagctcggtgggtgcctatgtggacggaaatgtggagaaatactttaatcacagctctaacctgtgtttatagagctcctttctcctgaaagtatccattaacttcggaataaatctcctgctctttgcttccccactttttttttttctgtaattatattcagtaaattactattatccaaattgcgcccggggaagagagacagagcgagagagagagaacttctaaacgactggaggaggccgcctaggaaaacacagggttcccaggccaggactataggaattagaatgggctagaaagttttccttttatttggcctggcattatccctttgaaatgagatcaatttcaagttgggcttccaagcccccgccctgcccggctcagcggcccctagccctgcttgtctgctcctcctagctcctcctggaggtgaggaaggggtgataatgtgcagtttgcctcttgctggcgccagccggccgcgctgtttatctggctgccaggggaatctgggcaattaggctcaggcggccttaaagtgccaggagctccttttctgcgtctcccatcatggggcttagggttgagtcttcaggttctgggggcaggaaggacgggcactcaggaggccccctccccatccacagcccctctttgggaggggggaaacttggcaacccgggaggcatgtggatcttttcctaagcaagatgctgagctggaaagatgggggtgtaaggtaatgtcccaaactgaaactttgccaggcactgggagaggctgtgaactcttttctggctttagaatttaggtctagatcccaaaaggctaagtaccccctgggggctaaccagaggcatgcctgggctgagctgaaccttctggtgcactggcccctggctgactgctcttctgcaggaagttggaggagattcctgaagttgattcctcaggctggatgtccaagggggttggagtttctgatgtctttctgtctccctctcttttctttctctccctaccaggtccacttctttcagaggggcctgcggtgctctaaaagttctcctgttaaagtttagagcaaattggttattattttaaaatcaataaaacttttaaaagtactaagacaacttctaagaggggagtggacagagggcctggtggcagctcacagtttcttttctgacctttggtctcacccaccaagtgtcccacctgagtgcccaccttgcccacctgaggtaatgccctggggctccaccagtccagatccacagggcgcagccatgtgggagtggcggctgattgttacccagtagtgttgatagcacattattcataacagccaaagagaggaagcaacccaaatgtccattagctgataaatggataaatgaaatatggtacgtccgaagaatggaatatcattcacccatgaaaaagaacgaagtccagcaccaaaacgtgctacaacatggatgaacttcgatgactttgtgccacatgaaagaagaagccagccacaaaaggccatatattgtatgaaatgaaatgtccagaatgggcaaacccatagagacacaaagtaagttagtggttgcccagggttttggggttggggtctagaaagtgactgccaatggggatggtgtttctttttgcgataaaaaaaatgtcttgtgtttagatggtggttgatggttgcacaacactgtgaatatactcaaaaaccactgaatggtatatttttaaaaaggatgaatcttagggtatgtgaattatatctcaatttttggaaagggtcacctgatattggtctgtaactggcctcccctgtaacacctgcagctaccttcatgtgtggccttgggcaggtccttcagcaagtgggaccttagtttcatatcagtgaaaagaaggaattgagttgggtgaaccccaaggcctcttctgtctttgacactctaaatccttgtgttgtggggtggagtctaaagccttcatacttttttagttgcctacaatggaatttagtgattagctttcagtccctgcagttgttaaacagttgtgtgcatactattttgccagagctaatgggagcctggtgaggtccctcctgaacggtttgtagtgctccactagctggcatgtctcatggttcaggttcatagattttctttctatctcacaacattggaactcccaactcagctatggccatgggtagcaggtgtcacaactcaaggcccaggtagctcttccaggtgggacttcatgagcctttcctgccttccaccttttgagtcccaggtaagcagcccctggaagagatgctggcattggttacagaggcttgactccagccactactgcccatagttgtcaagattcacctttggggacaaatcttgggggcagatgttcagagctccatgccatgtgtggcctagacctcagccagtcagatttttgcaaaagtaaccctaaggaattgcaggctttctgataagttcatgggggtggtggaaagggcatggaggtcagagacctggctttggttctggctcgatacctagctcctgagggagtcacttccactcaccaggccacagtctccttctctgtacagtggaaacactggcctcaattctcttttcctgtggaactccagcccttcctatgccctgcctcttatcctgagaggctggtcctcactcaaggctggcctctaggcctgagagccccctagatcctctttctgcacatctttggccacagatgcattcaactttaccattatcctcatcccagttgtctgtgtccacatttagtgagcgcgttctgtgcaggtggtgtcccagacccagcggggatgaaggggtgtaagacagggcatctcttgattccaccttattgggtggcagagcagagtcaggcctggactggaatcccagctccaccatgactggctcggggaacatgcgcaagtcagttttctcatctgtaaaatggggataataatgtcatctcatttaatttttgtattttgagaaaggattaaataaaaataggtgcctgatgagcataattaactactctgtacctgaggtctaaaatagtaaaattgaaagtgattggcatggagtgagacacaacgtagacaccgagcaaatgttcgcgtctctctcagtggctactctgtgattcacttttccttctccctaatttctgtccacagaaagtctctgtttctaaacctcagagctttgactttgttggaagtaactttgagctggaaaagccggggtggggaagaggtgaggcctcattgggtgtatggagcaaaacaaatgctcctgtaactaattgtggcttattacaattgtgaaaaacacttattaccccttgtgtcattactgatacccgcttaataatagttattaccactgagagtttgttttagtttgcgatttgattgtgtttagtttcatttaccgaaaatgaagggtcatttcattcatgcaaattgttacttagtttagcaaattgttacttcccataaagcaagaagctaaggaattcttctgaaagcaaagtatatgtttttaaggagaagtattttaggcaaatgaaacccaaagaaaaatatcatagacaataaggaatcatagcatctgagctgtagagagcttgtgttccacccctgtcctttacaaaaggggagactgaggccaacagctggaagtgactggcttaaggcctattgagatagctgggtttggccttttgggtcctaaccctttctactgtcctcccctgcacctaggaatgctagctctaatgcagcttgtttggacacgagtttctgtgtctgggcctttgcactcacactaggcttgccaaatttagcaaataaaatgcaggatgcccagttaaattcgagtatcagataaacaacacaccatattttagtataagtacacccccaatattgaaagggacacacttatactacaaaatgatgccatgtttatccaaaactcaaatgtaactgagcatccggtattttatccagcaaccctggctctgactttccctgcactcacgtttctcttgttaaagtagtaacagttactgtttatggaggtgtttttggacagggccaagagctgcactaagcattttacatacattatcccagcaaacctgggaggtctagatgattattatcctcattttagagctgaggaaacaggctcagagaggtgaagtaagttgcttgaggtcacacagccaaaggtggcagagctgggattgagcccatatctgtctgtgccccaagcctgcggctttaactgttgaggggatttgggcagcagaggaggtgggacaaagggagggcttcctggaggctgagtttattatttgggaaaccagtaattaaaagcatgtagaacctgaggtgtgagctccccaaccctggcagtgacatgctgtctcctgtcttccagaatctccgccacctccctactctcggctgtctcctcgcgacgagtacaagccactgggtaagtgtgccctccttcctacccttgcagaggtgtgtcccgaactgggtcctcttcagcccagtgtctgtccagcctcagggctggagggctggagggctggaggggaggggtgaaagccggactggttgctgtgaaatggggtgaagttgtacaaacactcccacagttgggccaaagcagacccagcttctgcagcaggctatttacatctcgaaattccgcggctcatcattaacctctctgtgacctttttaaacatgggcctgtcgaagatgaatgggttttgacttatgcatctcaccggaggtgggttggcatttctgtgtctctttcctctctcttgggccccccagccttgggttattctcctttagagtgtattaattagtagtatgacaaataggttgggcatgaagtctttgttgagaggagctgtacattttccccctttttaagccaagatgttcacttgagcagaaacaacaattggagtgttaaaaaggaatgtatattggtacacaaagcccctggcatggactgtcccctaggtgagcttagtggagttggtaattttagacaactcccattcagaggcagaacatgttttctgtaaaaccttgagcctagatgatcagcccatattctggggtagatgtaagtggtttcaaaagtagagattgttggctcacgcctgtaatcccagcactttgggaggccaaggaggacagatcacttgaggttaggaggttgagatcagcctagccaacatggtgaaaccctgtctctactaaaaatacaaaaattagccgggtgttgtggtacacatgctcccgagtagctataattccagctactcaggaggctgaggcaggagaattgcttgaacctgggaggttgcagtgagctgaggtcacgccactgcactccagcctgggcgacagagtgagtgaaattctgtctcaaaaaaaaaaaaaaaaaaaaaaagagtagaggttgtggttgggaacgatggctcatgcctataatcccagcattttaggaggctaaggtgggaggattgcttgaagccagaagttccagaccagcctgggcaacatagcaagaccccatctctataaaaaatatgaaaattagctgggtgtggtggctcaggcctgtaatcctagctacttaggaggctgaggtgggaggatcccttaagcccaggagttagaggctgcagtgaggtatgattgtgccactacactccagtctgggggacagaacaagaccccatctctaaaacaaaataaaagtggagattgcttggatctctgtttcctctagtggggtttcagagcatgggttctaaggcagagaagtgatggaatctgtgggatcctgattgtggcacaagttagtttggccctgacagtaccaggagagcaactttgtgacccaagcagttcccgtgggactcaagctttaaaagtcagatggcgtggcaacgatgctgcaacattccaccaagtgaccacaaaaagtgggttttgtttggtttttggtaaaggcctcctcccagtagtgtgtgtcagcatcatctgggaggtcacttctttttttctttgtttgagatggagtctcgctctgtcacccaggctggagtgcagtggcgtgaattcggcccactgcaacctccgcatcccgggttcaagcgattcttctgcctcagcctcccaagtagctgggactgcaggcacgcgccaccacgcctggctaatttttgtatttttagtagagatggagttttaccatattggccaggctggtctcgatctcctgaccttgtgatctgccctccttggcctcccaaagtgctgggattacaggcgtgagccactgcgcctggctgggcaagtcacttcttagtgtcgtagacactcaggcatatccaccccagttttctttccagacccctctcctgctgtgaagtcagaagtgcccaccaggtcccttcaggagtgtgaccttctcaggctgggtgggcagaggctgttccacgagggtgtgggagtcagccaccaaaccatggtggccaccctattgttgttccagaagtaggattgtcccatgaatgggggagccttagttctctcggaaactggagagatcatgtggtggaagcttgtcacttaagagatgaagaatcaaactgagtgagggcgaggagcttcccagctaatgagctgcagggttgaggtacaaactcagagcagcccccactcaggtgggtggctcactgtccttccctcggaggcctgtctcagcatttcctaagtcagcataattgcactagttgcttgtaggacccctagttccattagagaaaaaaaccctcaaaagttcttagtgaaagttcttagcacctcagtttgaatgtcaaggatcatcgccctgaggttttgtcagttagcctgtgataaagcagcaaaaatcaggacactgcccagccctgcagagtgaccatgtggaaaccaacagttgtccccatggttttacaaatgagatgactgaggcccagaaagaggaagtgacacttgccggtggtcaaatagctcagcccaccacctgtttttatatggtttgcaagctacgaatggcctttatttttgaagtggttaaaaaaaaaatccaaagaagcataatattttgtgacacctgaaaattacgtgaaattcagattttggtgtccggaagtggagttttacttggaacacagccaggcttgtccatttccattttgtccatggctgaggcagagttgagtagttgcagcagaggccgtatagttcacaaagctgaaaatattaacctctggccctttatagaaaaagctggtgagccctgatgttgcttgactcatagtggaggcgggacctgaacctggagctccaacttgcagatggagttcttcctccttgaggcttgagcagtgatggaggctgggaacattcttttgcacagcagccattgagacactgtccagggcctcactagaaacactagatgtgagggtttggcaagggcgtgatagggacttactagctgtgaaaggtggaaaccgcttgtcgtttccactcttctggaaacctcacaatgctgtctgtgttggctgtaaggcagttcactaagaaataggactcggcttgtgatgttgctacttcagatgagaagtggcagcagggctctgggcactgagcactttgggaacattaggtattaaaagcaaaacccttttaagaacttcccacttgagcactgagctttttttttttttttttttaaagatttttctgtgtgtacttatttttctcctaacatatttttccagcagataactttttcattccctgataaatagtcccgcgttattttttggtattattttctcttccttgcattgttgctttttcataaacaaaaagccagttcacttctaagcctctgtgatcacatgagaccaaaaaacaaaataaaacctagaacactcagtcagcatctggcaagtggaaaacgagagaggaaaaaaaaaaaaaaggccaaattggttaatgttttatcttcctgctccccaagccatgtggtaaaaggataaaaagttcctgcaggatcaaatggaattctagctagtgagggcctgggcaaacggttttatcccaggaatcctttgcctggagtagctgtgctgggccggctggggccaggtggagccacccgagccagtcctggattgtgccaggtgagaagatgtgtgtgctgcaggccttccaactcctggacaggcctgtcccttaacggggacaacacccattgctggtagcagaggcacaggcccaggaaaaattttccaagtcggcctgtcccaaaaggcatcggcttgtcaaactagcagctcagtgttctatagaaaatgtgcaaaagaatttctctttctcatctaactgctcggcagacagaagaaaaccaataatgtacatatgaagtacttaaaactacttaaaaaaaaaaaaaaaaagaacgccttaaaaaaaaacagtccaggcattaaaagttgctcttgtgagcaggtttggatgttagggagtgggggaggggagagaaaaaacaaagttaatctgggagcaaatgcttgagcccttaattagaggggtgtaagcgggacagagtgaggacggctggtgacttgttaaaacagtttccccagccctagcgggagggaggaaggaaggaaggaagaaaggaaggaaggaagcaagaaggaacaacttcaagaattttaatggttgtaattaagtacagcaactatgaattgtttaggggcttaatttaaccttacccacggaggctccaagttgctacttgctcggtcccctgaacttgggttatttctgtggtcagggcaatggcagcgttttcaggtaccagcttcaccacagtcagcactttccagaagagttcctgggctggctggtctggtctggggtgatcctgagatggggttacagggtgacatcagaaagttgggagggacatgctgccctttgcaagcacacacatccacacacgtgcacatgtacagagatgcatgagaaagaagaaaaaagagagcgctgccccacggccaactaagttctctttttctttcctcccacagatctgtccgattccacattgtcttacactgaaacggaggctaccaactccctcatcactgctccgggtgaattctcaggtcagcattttttcttgtgcattgctgttgtgttgaaatttatcgaaggggacagctgcggagggggcttggtggaagactttttgacttcccctcttctttttgtttcccttttcctccaatccttggatgggaaggttgccaatgtttcagtccctggtgtttttggggttaagaacagtctgtatgagtgaaacctgaagataacttttaaagcacctgtctaccacgttttaaccagttgtctctctcttgtctcacttggaaatgataaaagctcagcacagctctccctttcgtgtttagaaagagatcctcttcccccagctgcgagaggcagcaaagtggatgtggtatacatttgtcttcctcctgtcctcactccaggggagggaccaatgtgaagggtcagaagattgggggaattggagccggttgaatgagcttgcagggaggatctggcaagtgaggagtttggcaaagccagtggtttctgtgtctctccctgagcagcagatgctgggataggaagccgagggaaccgtggtttggagtcctctgtcccctgcagttagaagctggtcatagggacccctacatccggaggaatacctgaatcaaactttccttgagaaatgagaggttggtgttggactggggacatcgagggccaggaccaaggtctgtggggccctttgggagcatggctggtggcatggtggcctggtggcatgctggctgggactgacagcccctcaggctggggctgcataccttgtgggcatgtctggatggctgtgtgtctccatctgagacattcttccctcaccccacatccatgccatggtagcagtcgccaaaatcatagccatttattgagtgtatgctatggccggcactccacttggccgctttatatgcattctcttgggacagccatgggctgtttgtctccagggtttgtgctcttcatcactgttttgtcccccacttttctgcaagggccaaatgtaccttcaataaatgtatttcccctaaagtcctgtcgttcttgatgtagtctctctgcaactctaaggataatgcagcactggctgctcatggctgcctggccatttccccagcccagagcctttgcctatccattcccttctcaccaaggcatgggagcttacaagagtatgactgttgcagagatggggaggctagaagcggaagcaggaatgtgacttgccatacagggtcccacaatgggcaacctggtcctgggctgcggtggtcctggggtccaggtcttctgggtcctattcctgagtgccttctggtctttggtggctcccttcgttagggtacttccttctctaataatttatttccctcaaaggcccaaccagatgaacgcaagttaaaatttcaatcctttcttttttcctctgcacctacatgagtgaaagccacatataattttgaagcaaggggcttaaaagtatttctgaatttgcgattttgtgtcactgccagccctcagatggattccattggcgttggttgtctggacagatgggtaattttttggcatcctctttctccctattgttaatgatggaaagtccgtgtgtgtgtgtgtgtgtgtgtgtgtgtgtgtgtgtgtgtctgtgcatgtgcataccttacagttttaaggtgtttgcagatgtaatctcatttgatcccagccattccagagggggcctggtgtggctcaggctgaaaggaccagacccccaagcactgtcaggaggcctctccctcaatccagaggctgggaagtctcaggagatcccaaggccattagttttgttgcctttgggcctcactgggcctgtgtctgagatttccgaccggatatcccagagcagtctttggtactgggtggtgagaaggtccctgctactcatgactgtgcaaaaggactgtgttggaaaatgtgtccaatgctttagaattctaaggagcggaaggatttggggaggaaattggggatttcctatgccaaggacattgagtgaggtcttgaaggactttggtgtgagttctgggtggcctcagtaggtgaatggagtgtttccctttgtgtcatcctggtcccttccagggatgccatgcgtggaatgttccccgctgagggcccactgttagcttttccagcttgctctgtgctgtagggatctgaggtcctgtgggttaagctgcccgcctgcctactgggagcccaaagacatggggctgtgctggctgtcacactggaggacatattcagggagggaaatggcctagggggtgacaggtcttggtggatggtgaaggcacgagtcattctgcaagatggaatgcaaggttgtgtgggagggcaggactggaggtgaagtcagaaaggtgaggggcagaggtgggcacaatgtgttgggccaggccggggcatttgatgtctaaggacaaataatgatgatggtgctgatgatgacagcagttgacatttatcgacactcactacatgtcaggcactttgctaagcgccagcattctccatttcattgactccttaccacaaccctgtgagacaggtgtgattctccccatttcatagaggaggaaactgaggctcattgctgggccaactgcccataatgtaagtggaaggcttggaacatgagcctggacagtgtgactgcctagctcacaccctgagggccctgcccagtgttctacaacaagtatccctgttcccttccccaagccagaccctggcaggagcaaagtaaaatgatccaaaggagcctggtgggcacctgtcctgatttaagtaccggggaaggggatgaggggctagcgagggtgcagggcggctccgtgcccttccaggccactactggacaaaccttggggaccacccagagatcacaccactcgctggcctggccttccatctcccggagttctgggggtctgccgatcccgagagccttgttaccctcagtgtcctgggatgtacgtcatccccaaacagggtgtctgcagccccaggatggagactgccctagtttgtctcgcacaatgacaatcccagcgctgggcctgggactcttatctgttttatccagctccatggtctctgctttacttccctgtcctgttgttgaggccacttgggggaaggatgggcctcttgaggcttagtcccaggcccaggcaggcaaggaggcatgagtgggcagggcgaggggccgcaggaaaggagacgcagttgcttcagctctctgccgagtagttgttggaaaaccttcatttgatctctacatcagctcccaatttggatacgtgattcccactaaacagtgtagagggggcaagtggcttcaccaaggtcactggggaggggggtggtggagggaggctagaatgcagagctttaagcagatctggagaccttacacctggagtctttgatgggatttgggaagaatggaaagcctagaacttttggggtaccttcagaactttggcactctggtttcctcgcctaattcagggcgtggggtgctgtcacctgactgtccaaggcccctgtcaggctgtcctcttctctgctgtatttcctttcctcttccatttgcttgatttcagtttagtttggggaggaaaggaagagaagctagttaaataaattcatactaaggtgtgagtggctggtaggcaaacttttttttttttttcaactttaaagtagaacatgccataattctcagaattgcaggatgaagaaatggcagttccgagaaaggctggtggcagagggcagggttctctcagcatctctgactccagcctagaaaaacaatgaacatgtcataaggagctttaagccctgggtgagggaaggagccctggccaggccgggctgggtgagctctgagtcacttagcgggagcctgaagtggcagggctgcttaagcacccgggcctgcctgactccatgctgtggggctggaggcggcacactgggcaagcttctttaggaccagtagctcccctctgctgtcttattctagtgcctgtaagataaccattcaagtgctttattaagcatcctgtccctccattttctcacttgtaaaatgaggatgataataacaacaaacatatccttaatggtgagggttaaatgagatactttacccctgccagggtctagcacggggaaggggatggggacgcttgttatggaacactgggcagggccctcagggtgggagctgggcagtcactgtccagctatgtgtaaggcatggtctaagctgcccatcactgggatcgcgcagtccttgctggaaccttggccctctgtgcctggtatctcagtcctcacagcatgtgggtttctttagagctgtgttagtgagagcaggcccttcagtttagaaaggaggatgccaggggaaggaagggagcaacagtaggctacatggagagttgggggctgagctggatgtgggtatctttcctccaccaaccagactgtaagctccttgagggcgcagatcattttgtagattgttgcattgtgtaagttggcagagtttgggaacagaggctcagggaggttgggagactggctcagagccatacagcaagcagagcagcgtggacccacctagggttgcaacccaaggtggatccacactgcttacccacctgccactcggtagcacctgtgcctgccgtttgcccatttccggggtccgttggggttggtgctgtctggtgttatcgtcagtgcctactgaagctgggagaggagtgtgtgtgtgtggtgtcatttcctgctgttttcttgattacagggaccaagtgtgttctcgtccaacaacaccctcatctaacagactctgagagttccgtgttccagggtgtgtggttcagtccattcagtgtgttctgagtccctgtagctgtggtgggctgaagagcatgggctctgcaccagtgggccctgcaatcaagccctgagtcggccatctattagttgtgtgaccttgggagagccactcagctgctttgtccctcagttttctcacttgtaaaatggggttgataataacaacatatccctagtggtgagggttaaatgagatgatgcctgtgagtcagccaaggcctgtcacactgcatgtggtgggtgtggccatcacagtgttccaggcactgtgcatagggctaggggcacagagataaaagttacattgtttctgccctcaaggtattcacagataggtaaagacacaaacaataacaagaggcggtccagaggaagaagggattagtgatcaactctcaactcttggcgtggtagggaggtagctggggaaggcttcctggaagaggcgatgtcttttaaaaaatgaatggaagtcagaaagacaggatttggagcattccaggtatagcagatgcaaagacctggaggtgtgaaaagaacttgatgttgagaaaccaaaggagtttcgagggactgggaagcaaagctccagatgttggtgggagaaaagatgggcagagaccaggacctgggaaagatttttttaaaaaacttctatccaaacatgccgagtggacatataagtgccagctccgtgaattttcacagactgatcacacctgaccaatagcagggcctgcggaaagttgctatcacatgacgatgctcaagcctgtcacgtgagagtgctcattgcctgtgggtctggggtgctgtatgcagagtggtttcaaagggaaagcaggagggcaggggatatgttttagctgaaaagaacatttcattgagttttggagagcaggaagggcatttcatctgggtgaatggtgctctgaaacaatcagacttgaacctagcccggtccctttgggtttaagaggtggccctcaggcatgacccatgcccactctgcctatccccaggggtcaggctccagcctagaggcagtggacaggttgccagactgataccaattgtggccagcaccaccctgccatttccaactcagaaatgggtgggggagaaggagcattcagctccagttccaaacggatggtatttactactcacatcaatccctcgccatgtgtctttttagctttgaccaaccaaagggaaaagaaatgccttcctttcctaacacctcctgagtatcttacagaaggacccattcttcctgggctgggtagaggtgtgagggggggtcggcaggagtgatgggggtgactagagcagtcctgggggaacagacagctgaaggagggcccagccaacctgtgtctgccaagaagcaatgcgggatggtgggcagtgtgccagagtggtttctaggctcagctgtgcccttttcctgccatgtgaccacaggcaaattcctcacctctctagtctcagtttgctcagctgtatattgggtccactgggtcactgatctcaggggctccttggtgctaatgtgttccaggctgtaagtaccagctcccaggccttggggtggggagtagtcaaagagctagggcttctctcctggggcatcttagcttctcccgtcgttggccaaaagcaaaactgtggcatggaacaaagtcatgaggagggaggggatgggtgtcttggacctccacccctccatcccaaggcactaaagcttgggggctgcagtggggatatacttgcaaagtccagagagggcaactgactcatcagaggtaacagagcttttagactccccatggcctcagacaaaggacttcagggctattgtgtttcctgagtgtgggcttttgaatgacaagtcaatgtactgaacatttattattcagaacttactgcagctgggtgtggtggcttgtgcctgtaatcccaggctgaggcaggaggattgcttgaacctgggagtttgagaccagccgggggcaacatagcaagacccctacctcttaaaaaaatttaaaaattggctggccatggtggcacacacctgtagtcccagccactgaggtaggaggatcacttgagctcaggagttggaggctatagtgagctgtgatcgcaccactgcactctgatccaacctgagcaacagaacaagaccctgtctctaaaaaagtaagaaacataaaaattaaaaacaaagaagaatttattataaaaagggggaaaaaagaatctactacatgccagtggcagatgatagaaaatggagaaagactggaccttcccctctaggagctgctggtctagaggagaggcagacagcaaacagacagtggtgactgatcatgctgagtgctgccctagagatgtgctcaaagcagggaactctgttggggtggggatggagtattcagggggcattcaccttcacagagaaggtgattctgagttgggttttgtaggatgactaagagttcaccaagaggacaacaggctatagataacctttcaagtaggaggaacagcttgtgcaaaagcaaggaggcatgcagttaataccatatgttctaagagtttgtggctagaaagtaaataagcgagagatggaggaatggggaaagatgaatccagagaggctgtcctgaacactagaggaatgagctgaaacagctgatcatggtcatggataccagggaaccctgggatatacttggtcctgaaggacctcatctggcttctaatactgggcctagctcacagccagggagtcattgtggaatgaatgaatgaatgaatgaatgaaaatgaatgaatgaatttttgcctggggtaaagagatccagagagagcccttaaagacagaaagatcatcacacatatttaatgatcacagctaacacagagtacctgtgccaggtactctctaagtgccataaatatatttattcatgggctactcccaaccactctgaggtagccacttttattagccatattaaaggaagaagtaacaggctcagagaggttaagtaacttgcccaaggtcacccagcaagaaagcaatagagctgagattggaacccaggcagtctgttgggttcctcagtgtctgataaggcacccttgctggccctggaagattcaggacacaaacatgattcttgagcttctggggcttctgtgtccctgggtacctgagactcagcatgaacaatgatcaccccaagccccccagtggctctgctcattgggtggttgctgagtggataaatgaatgacgagtgagatggcaggtgggtgggtttctgaggggaggctgctggcgaggcagggtgtcgggtgcctgtccagggctggctgcagatggcccctacccctcactatacattggcggcctgcatcatcaggggaaccggcaggttgtctgaggagaccttaaattccagaaaatgtacttggttgcgtccagcctaatcacaaccatctgcctgccgggctctagggtccccctcctcctatccccactggcatgctttccctgggcgtctgtaacaatcgggaactgcgctcgaaagtttccttgtcagggtagagtggctgttgccaagagctacttctttgatgcagaaaatatatcctgaaggcactttgtcagatgtttttatattaaacatttttcctccatggcccttggctgccaagggaagcagagatgcattgctttcccagttgtcctttgtggaaggaattcctgatattcatggcccgtttccccatgccccccagtcaggacctggcaccccctgccagaaagggtaagacctcggggctggcatctctgcaaagcaggagctgctctggccccagggagggaccctaccctcaccatttggtagcagtttctagatttggaaaaacagaggtctcatgtctggagcggacatcaaagccaccatccagactgcaaggtgaatcattgccaagactttaattgatctttaaaaggagagatgggagctcacagatagggatctggaagtcattttgatctctttgagttgtccagggtagtgccagtgctggacagagcagggagaagctgggctgggaggccttccatgccaggtggggaagaaggaggggaggccagctctgtcacatgggctgaaattgggaggggcagggcaccatttggctcctcagcagccatgggagacagctaaggtgaggggctttgctgggcagatgtcatcagtggggagcattgggagaggggttggagtgggtacagctgtctgactccagcttccttggagaaatgaggtgaaatggggcacccagcaggcaccgctgcagaacaggtggccatgctagcccctcagggcctgtgtcctccgagtgtcccaggactggttctcccccacctgccaccccttcacttaccttcctcagtcctcctgcccactgccttatgtatgacattcaggggaaatgtccctggccctgccacccagtggctgtgtggtctgcaaaccacacatccactctggacctcaggtttggcccctgaggaggctactgggcccgagggatgtgcagggtcactcccaggccccttctctgcacctgccccccaccctgggatcactggggaggaggagacactgtttccaaagtgaggactctaggctgctccctgagggcagatgttgggaatgaggcttgggggacttggctctgagggcagagtctggtgtgtagtaggcgttggggttatgtttgtgattcacagaggggtccactgccccttccctctgagggttcaaaataaaacaggacagactgcacagagaggccaaggcatctccacaccaccagactctctcagctgggattgtctgtctcaggcccagggagactctgactggggttggggggctaggtgatgaaatctctggggcttcctgtgctgtttgactgagagggaagccgaggagggtggagagagggcccaggctcttaagtaggcagaccctgtctcctgctacctggctgcccagctgtcttagctgcattctccctcacagggcgaaggccagagagagctcagaggtttcctctgagtctaaaggtagcaccacccctacctgggggccaggaggcccagctcctagtcctgactctgttccctgtttcttggtggcctcaaactacttccacttgggcttgttcatgtataaatgggtcagttggtccaaatcattggttctccaccctctttgcacatcaatcctgtgaagagttttggaaaagcttagaccccattccaaaaatggttggggctagactgggcattgggatttttttttttttaaattccccaggtgactctaatgcgcagcctgggctaagaacccaaatctagatggacctggaaggatcgcagagcccccagactgtctcccactcaaggcaggagtcctttctgtatcagagcccctggccggtgcctgattacttctgggcataagcatacatgggataaacagcctgttcttttgtgaactgtgctggctcttttttcttcttcttcttttttttttttttgagacagagtctcactcaccatgtcacccaggctggagtgcagtggcatgatctcggctcactgcaacctctgcctgccaggttcaagtgattctcctctctcagcctcccgagtagctgggactacaagcgtgcgccaccatgcccggctaacttttgtatttttagtagagatggggtttcaccatgttggccaggctggtctcgaactcctggcctcaagtgatccgcctggcttggcctcccaaaatgctgagattacaggtgtgagccactgtgcccagccataaatgctgtttctccaataagtagtgtgccagggcggctgccagggaggctggggtcagagctgggtttgaaggtgcaaggtttcaccaggcttaagcagggaaagggcatcccagcttaggaaactgttgggcaaaggcaggaagatgtgaggacacttgttctgggaatggggagtgattctggcagggcagtaaggaatgagccccacagggagagggccttgaatgccacttcagggagggctggacttctatctggtaggttagggatgggcatcccagaaatccttttaattgatacacggatgactgtgggcttagcgaatggatttatatggccccaaagtgtagagtttttttgtttgtttaatgtaaactttttaccaatacataatacatgcagaaaagtgcagatgtcacatgtgaacaattttcacaaagtgagcattcttttttttttttagagatagagtgttgctcttgttgcccaggctggagtgcaatggcgcgatctccgctcgcggtaacctccgcctcctgggttcaagcaattctcctgcctcagcctccccaagtagctgggattacaggcatgcaccaccacgcccagctaattttgtatttttagtagagatggggtttctccatgttggtcaggctggtcttaaactcccgaactcaggtgatccacctgccttggcctcccaaagtgctgggattactggcgtgagccacaccacgcctggccaaagtgagctttcttgtgtcactatagcccagatgaagcaacagaccatgacctcaaaagccccctctcatgtcccctttcagccactcctcactccccaagtgtacctcagctctatcctgacttctaaccccatcgtgtagttttctggtttttgaacccgatgcacacagaggcataccttgttggctttttggaatatagcttctttaactcaacagaatattcgtgggattcatccttttgttttttttttgttttttgttttttgaggtggagtctggttctgtcgcccaggctggaatgcagtgatgtgatctcggctcactgcaacctctgcctcccaggttcaagcgattctcctgcctcagcctcctgagtagctgagattacaggagcatgccaccacacccagctaatttttgtatttttagtagagatggggtttccccatgttggtcaggctggtctcgaactcctgacctcgtgatctgcccgcctcggcctcgcaaagcgctgggattacaggtgtgagccactacacctggcctcatccatattgttgttgtgtattgccgattgctcattctcactgccagataatattctgtgggaatggactgtgattctactagtctaacatatccattctattactgatggtttccagttattgatagtgcccagcttttggtttctacccatgatgttacaatcaataccttataccagcctttttgaggacacaaggtcatacttctcttgggtacatacctgggagtggaattgctgagctctacattatatgtgtggtcagccttattagatactgtgccagactgttttccaagaccacagcgttttagtcagaagcccctctagaggggatttggttcatttaccctcttacagatggggccctgagaggggcagtgcctgtgcttggtccccagttcccaagtggcagagctcggcctagagcaggatctcccctctctgcgtccaggacctctgcccacacggaggtggtggccatcctgctactcagacaaaactgagtcctgtccccctgcgtctccctgcatctccctgcatcccccggcacccctgaggccggattttaagctccataatgtcctttcctaaggccctgggcagtgcactctgggaaaaacaaaaaggagaaaagagtgaaaggaaactaaacattggaaaagaagtgtgtttccaataaactgggcctttcaccggtagccaaaacattacattcctgtaccccgggagcagccggccgggtctgcctctctgggctgtaaatcttgctgggagttgggtcaagattgtccccaggacacacagacgggcagtgtcctttggggctttggatccttggatttcagggtgacagcgtggtgttttcagccggttggctgggccccaggcgagggggcgccgggcccctctgacagcgtggactcccaggcccttctgagggagcactgtgtgagttaccgtaagggattttcttccctggcccgccccctccctttcttgggtgctttgatgggtttgaggtgtttataggcttgattcacgaccgagttaccagggttttccacggaaataacttattaaaggggccgtgcacacagcgacattgaagtctggagagtggtgtgcatcaaaggcggcaccgcggccgggccagtcagcatttcgctgagccctctgctccagacgagggcctgggcccgcagaaggggcggggagggggtgggcctgggctgcaggaaaaacacttgggcttaagaaaacactcgccagacaaactcaaattcaggtccatggaaaaagaaggtggggagggagttaaagcccgagatcccagaccagccctccgtcagaccctcttgcccagatgcggggacacatgtgggtgccccgctgatgcatggtgtgcggattctctgttttcactcctgcacctctccttggtgcagggctgttccttggaaggaaatgccaaggatgcggattgcccactgtcttttgacagggatggatggagggataggctgggtcattggggagaagttggggtagagggatttgctggttcctctctttctgacagcttcttttctttgattttgttacatctgatttgtcggtaaggttcatgaaaagccttccttctccaggaagccttcagggattgcacagcccacagtggcctctctcttctgaaccttcagtggctttcatctctatactgctcccttgtagtgcattgaatttgcattgagtttatctgctggcccagtcagactgtgagtgacttttgggcaggaccttggtctgcatttgtgtcttgaggttgtaaccaggaaactggtggccctggcgcctagcatggcccacctcatgcaggaggacatggtgtggagtcattacccatgagtcagtcctggctttttcatagtaataatgacaacagcagtaggagtagtaataacagtggctaaaagatgagtacaaaacagatggcagacactgtgctgtttcttgttccttaagcttatttagtcctaccaacaagacgagttctattgtaacttatctccacttgatagatgaaaaaactgaggctcagaggggagaggtaatttgcccagtggcaccaagctggtaaatacagagctggggtttgaacccaggcctgcctgcctccagagcttgtgtccttggatgagtcactttattttctgggccagaatggttgtcacattctatcagtgagctcagagactgggtggagaaatgagaagccctcatgaggctgtgtagagcttgttgtttttgttttggtttattaagataaaatcaacatacagtaaaattttgtggaagtgtattattatatgaatttttataattatgtaaccattattgcacaatcaagatagagaacatttctattacccttaaaagttccttggtgaggccgggcgcggtggctcatgcctgttatcccagcactttgggaggccgaggcgggcggatcacgaggtcaggagatcgagaccaccccggctaaaacggtgaaaccccgtctctactaaaaatacaaaaaattagccgggcgtagtggcgggcgcctgtagtcccagctacttgggaggctgaggcaggagaatggcgtgaacccgggaggcggagcttgcagtgagccgagatcccgccactgcactccagcctgggcaacagagcgagactccgtctcaaaaaaaaaaaaaaaaagttccttggtgagtctttgtagtcagcccaaccccaaccctgagctgctggcattcagccatctgatttctgtctctatagttttgctttttccagaccatcttccaaatgtaattatatagcaaatagccctttgtaccttttttaaaactagtatactgctttgagattcatccatgttgtttcttggatggacatttgggttatttccagtttttttggctacaaaggtttgtgttcagatttttgtgtgaacatggatttcagttcacttgagtaaacgcctaggagtaggattgctgggtatatggttgaaagtacatataactttacaacaggcactgctttccgaagtggttgtaccattttgcaatcccaacagcagtatatgagaattctagttactccatatcctccccagcacttgatatgatcagtttgtttttatttgagttattctaatcataagcggtagtatctcattgtgacttttttttttttttttttgagacagagtctcgtgccatcacccaggctagagtgcagtggtgtgatcttggctcactgtaacctctgcctcccgggttcaagtgattcttgtgtctcagcctctcgagtagctgggactgcaggcatgcgccaccacacccagctaattttttgtattttttgtagaggtggggttttaccatgttggccaggctggtcttgaactcttggtttcaagcgatctgcccacctcagccaaagtgctgggattacagacatgagccaccatgcctggccttgtggttttaaatcaccttcctaatgatgaatgatgttggacatgttttcatgtgctaacttgccatctgtatatcttctttggtgaagtgtctgttcaaatctttgcacttcccctcctcccccaaagaaacagcgtctcactctgtcacccaggctggagtacagtggtacagccatggctcactgtaaccctgaactcctggctcaagtgatcctcatgtctcagcctcccaagtagatgtgactacagctgtgtcccactgtatctggccaagttttattttattttatatatttttctagagacagagtcttgctatgttgccgaggctggtctcgaactcctggcctcagatgatcctcctgtcttggcctcccatggtgctgggattgcaggtgtgagccatctcacctggccaatttttaaatattgggttgtttgttttcttattattgaattttgagggttctttacatattctagttagcagccatttaaaatatatgtgttttgcaagtatttcctctcagtctgtgtcttgtctttttttaaatgaagtcttttgaaggttttaattttgctgaaattcaatttatcagttgtttcttttcatgctttttatgtcagttatatgaataattctgccaaacccaaggacagaaattttttttttatgttttcttctagaagttttatagttttaggttttacatttaggtttataatccatgttgagttaattttttataaggtataaatatgagtctaggttcttttttttcatatagaggttgttctattattgtatcatttgttgaaacgactactcttttctttttgaattaactttgtctaaaatagttgatatatatgtgtggttctctttctggattcttaactttgtcccatggtctacgtgtctatccttttaccaatactgcactgtcttggttgctgtagcttattatagtaagttttgaaatcaggtcatgtgagtcttttgtctttttcaaagttgttttggctagtctaggcatttgcatatgtatataaattttagaattagctgttgatttctacaaaaaaggcctgctagggttttgattgggattgcattgaatctgttgatgaatttgagcatcattgtcattttgacaatattggttcttatagtcaatgaacataatatatctctccatatatttaggtctttgatttttctcatcaatgatttgtagttttcaacacacagatcttgcacattattgttaaacttgtacttaggtaattcatgtttcttggtgttattgtaaatgttacttttaaacattctccagttatttattgctagtgtatagaaatataattgatttttatatactgaccatatatgcataggactttcatggcttggatgcttggtgttgagtgtgttttttcaggggaagagttgtaaagtgaagaatttatttatttcttctggattcccagaaacaaatgtgacactttgggcaagttgcctcagcctttgggtgtgagtttcttgtctgtaaaatggaaggcaatggagaaaactggattcaaagacctggtgaggtcccatcccgcttgggcactgatgttcacataaactgcaggatgggagatttggaggagagccgagtccttgtcatggggaatcctttcctcattttacagaactgacagggcagggcacttggcctgcagttgcacagaggctgatgaaaggacaggtctcctgtgcccgagctggggtcctgcaccctgatttggactgggaaaggcaacccagcatggtgactgggaggcgactccacagccgggagggagggagaggccggagaggcggccatcagtgcttgcagccaggaggcccaaggctcttccgggagctctgaccctcaggagtggccagttcacatttggctgttttcagagtagaaaagcactgtgcttggaaattcgggttttggctgacctcaccccgcggtactgagtgtggagtttaaaggcctttgtaactctttggtttggaactgggttctgggcatggcaaggggaaaacactggaacgcattaatgctcattccattcgccctgcctctgggagagggaagcaacctcctctcccttggtcactgcagacagctcgggaaactgaagggggaacagagcagggagcggaggtcgagggaggggaagagcctttttagtcggagaggccctagcctggcatttatttaacagtgccaggagctgctctaagtacttggcactaccctttagctttgacttttatgacaccctataagttatttcattttacagataaagaaactgaggctcagagaggtttcacttacttaccagagtcacacagatagcaagtgaaagagctgcgatgagaacccaatttttccccaaactcaaaagctggtgtgatgggaagtgactgtttattaggtagacggcttccatttaggatgatgaaaaagctctggaactagatagggtggtggttgtacaacattgtgaatgtacttaatgccactgaactatgcacattaaaactatgtatgttaagttggtaagttttatgttatgtgtattttaccatatttttaaataaaagctgttgtgccttccatgctgcctcctgccgtagcaggttccatggcatggtagagtgtggaccctcatggctgtgtctcccagcaggtaggaccgcccagggtcccagcagaagggtgtgcgggggctgtggccagcagaatagccacggccagctcggccttttcatgccatcccctgcttttaggatacagagaaactcaggccctggcagcgtcatgatgaggatgccaggacaccatcccagagctcttggtccacacaaaagaggtgggacctgaggtgaccatggcctgctggccaccaaagccacaccatagtccagggctgggtgggagccagagtggatggccgggtgcctgcctatttggcctctggtctctgtcccttggcactgttgggagttatgactctttccccaacaagagccttctcctttgggagggcaatcagggaaggaagtcaaaacttaactgcctgtatttttttagagatgcatcatgaaggatgtagggggaaatgatgtgaggtccttcagccaaaacaaacaagccaaacaccaaataaaaggggctagatgaagcaagtgtggcaaaaatcttgataactgttgaatctgggtgagaggtagtttaggttgggttcttagaagcacagcctgagatgggattcagatgcacaaagtttattggggggcgtgttctcagaagaaaggaatgaggggagcatgatggggcagcaagaatgtggtctccactggagtccagctcagcctgatccctggggacgtggagagggaactgctcctctgaatggtcacactttgaggtgtggggcccagccctttgttccatgtcagttggtcattggctgtaggcagacaagcaggcacgtgtgcatgcacacacacatacacacaccccacattggagggaggcatcattgcctgacccaggacaattctcccgataaagggacatctgtgagccattgccccaaaactcccagtagctagaggcgaagaggacctggacagggtgtgtcacggtatccgcgacatgggtgtatgggggtttattgttactattctttcacttttggtgatgcttgaaatttttcctaaaaaataaaaaacctctactagaacaaagttctgaggaggatggaagcaaagccacccacggagtgctggccgtatgccaagcatcttgctgccttcttccatctcggtgatttcaccgataccaatggggaaattaaactcaggaaagttaaaggaccagctctaggtgtagggttgccagatttagcaaaaacaaacaaaaaacaggatgcccatttatatttgaatttcagaatacaatgaaaaaagtttcacatgagttgtagcgtgatgtgtcccatccaatactggggacatacgcatactaaaaagtgatttgctgtttatcagaaactcagattttaactgggcgtcctatattttgtctgataacactacctaggttacacatcttgtaaatggtggagctaagattcgtagtgaggtggggctgaccccgaagcttatgtttttcacccctgatgggtacagcactaacaaaaggtttttggaggcattctctcaccagggcctcatgagggtgctgcctgacagcagagcctattaggatcattcggacagctttgaaaaaatattgatgcctgggctccaccccagaccagttacatcagagtccctgttagacactctccccttccccctcagttccttctcttttttttttttgagatggaatctcgctctggcaccagagcggagtgtagtggtgtgatcttggctcactgcaacctctgccccaccctgggttcaagtgattctcctgcctcagcctcctgagtagttgggattacaggcatccgccaccacgcccagctaatttttgtatttttagtagagacggggtttcaccatgttggccaggatggtctcaatctctcgacctcatgatccacccacctcggcctcccaaagtgctgggattacaggcatgagccgctgcacctggctccctcagttcctttttaaagctctgcaggtgaatctaacatgcacccagggccaaggatcatcggcctgggcctccagctctcattgttcatgaatttgggaaggaataaaccaagggggaaggcagagagcacaggtctccggaggagctggcatcacttctcttttcagcatcctccccgggtccctgcctccagcaggcccagggtcagcctggcacacaggctctgccccaaactgcctgcatgctaggcttcttcacagcctttgccagtccctctacttggaatgccctgccaggctggttttacccatctggctggctcctcctgttccttctgaaggtcccacacatatcacctctctctggagcctgaccccacagcagagctggccaccccatccttcattgactcatggcacaggcttcaggagtagcactctgctagcagaagtgagcgcgggtcggctcacccactttgctgctagctcagtacttctccacctccgacggtagtgcctggcatggtgtaggcacttggcacatgggtgttgaattggaggaaggaggaagggttttgttgggtgagtggggtcccgtctttcctcctcaccccattggccctggagagatccccctttcccaccacttcctccttggcatataagttctgtttgcctggagcctaggccctttgcagcccaaaggtaaacaggtttataacgactttagagaaaaaggaaaaaaaaaaaagcaagtgagccaggaagtcatgcaattccagcttcaggcctggggaggtggaaaaaggcccgtgtggcaaacccagagcctgggacccaagccccagtgacgcggagctgagcctccacttcccagaacttcactctggataaacatggaagtgaggagtgccgcctcctcccttctgaaatagggttgggaggaggagaagggtgaggaccctggttaggagagggaaccctggggtacctgctctatggtaataataaaaaggctgatacaattgactctctggactatttttgagtgttcagttcagtggcgtcaaggacatttacattgctatgctaccatcaccaccatctatccacagaactctttgaatcttgcaaagggagaatggctttgtaaagcctcatattttatcctgtggaaaatgtacactgagaggctatttttataccaatagctggggacacagatgaagaaaacagccccctgcccgtgggaagctcctacgcttgtgggccaggcaatcccaggacagacaggcccatggagccagggaaggctgctcgagggaggatggtgaagcacagctggaggtgtgcagcgggtgcatactccaggcttagctccgaacaggacactggggctgtgcacacgtgccactctcatacacgaatctgttcgtgtcactgtggacatggcagggggttgtgagaggagtgtcaacgatcctccaggaagtttggaaaatagaaaaatattgcctgttccacaaccgccatgcccagtttcctttctgtccttcaatttcttgtctcatgcacatatttccacttgatcacagcccagtggcagagaagataacattttcctctctgccctcctcaccttacgtcacattaaacacttttccatgttgcacccaggcttccaaatgtctacgaataaccctgctttgtccagggagcgtgtctgccatgaattcccctccaagcgacagggtgggtgtgggagtggctgtgtcgggggccagagagcgggttctgatgggtgggctgaaatggaggagggatgctttggcagtttgagggcatctatctggagcaaggtcatggatggtggaggccgagactgtgtaggtggtatctttgagtcactgcagtgcattcacaggcgtccttctctgggtcctgtatcacctgagagtagctaaggccctcatctggctgcaaatgggacccgggtgtggatcgtgctgtcctgcagccttttggacactagaggtgaccagtgaatgtttagcattatgtgtccatcttcccagggctctaagagaggaaccttacccaggccttctttttcttcttcttttttttttttttttattgagacggagtcttgccctgtcacccaggctggagtgcaatagtgcagtctcggctcactgcaacctccgcctcccaggttcaagtgattctcctgcctcagcctcccaagtagctaggattacaggcacctgccatcacgcctggctaatttttgtatttttagtagagacggggttttaccatgttggccaggctgatctagaactcctgacctcgtgatctgcccaccttggcctcccaaagtgctgggattacagatgtgagccaccgtgcctggccttacccaggccttctaactgccaacacagagccccttctgtcccacatggagcacgggtgggcaggcaggccgtcaagagccactcagggactgcaggtgtgcattgttaagagcccttggtgaggggtgcagaaggtgttggcggaggggagggggcacggggctggcagtggcatctttgtggtttgctttaaatatacctatttgctcttgttttgcaaagaagcatgtggcatattagggaaaacttgtacctatttgctcttgttttgcaaagaagcatgtggcatattagggaaaacttggaaagctgagaaaagtgcaaagagatgcggggagggaaatcccataatctgactgtccagagataaccactgttaacattttgctgtattctgtttaaattaaaagaaaaattttaattagtttttttaagagatgggcctcgctttgttgcccagggtagcctcgaactatgaggctccagcgctcctcccacctcagccttccgagtagctgggaccacaggaacgcaccactgcacctggctgttatgttaaaaaatacagttttgcgtcctgccttttctcctcagcattacgtaaatattttcctgtgtcattaacattcttcataaacattgtttttgatggctgcgttctattctggtctatggatctactagggctgagttcttagcttgtgagttggacacctggtctcccaggtgggagaaagagccccagctgggaggtggggtctgcccacatggcaggccgtggcactcaccctggcagtcctcccctgtgcattcctggctatgctacatcctgcccagtcctgtggacatccagcattatccattcccctctttgagcttctgcagccctgggcatgaattgaaggctctttcaggaagccttctctagtcacccagcttggtgtggccagtgggtatttgccatcctctctgaactcccgagaaggagacacatctgatccttagtacatgctggcgagatggcatggtgggatcgatcctgccatgtttggcctctttttcttgatttctttgcagagcctggctttagagtaacactttgccattcactagctgtgtgaccttgggcaaattcttcaacctctctgagtcttggtgtttcttctgtaaaataagggttgtaaaatagtggaccgtttgcctggttcttgtgaaaaccaagagattatatgccaggtgctgagtactgtgctagggacatgttgggtgcttgataagggatgggggttattctgagtgtcagcggtgggactgttttatcctgccatctcccctttcacccacaggaatgagcagcccagtgggtaaaggttggccagaactatagttgactcaactacagttgagtgaatgatctttgcttgcttttcttcctcccacactttggttggggaaactgaggccaccctgaagttcccacctacacctcatgactttctgagatccctggagggtggcttaggaaatgtctttggagatttgggaacacactggatacatcagttggtgagccagggaaattagcaggaacgagctcatttcgatagcaatgagctgagtctccctccagctgccagacatttacgaggctggctgggtgccggcggccggaggcctccaatggccctcatccctctgccttccggctggaaataattcgtgtttaaaaaataacaataataaaaaaaaaatctccatcttctctggccttctggtttctttgggcccaggtggggagatggtggatgcctttgccctgtaagcagctctctgttcagggcaaccagacaagaaaggccatccctggccctccccaaccctccctcatctgccagaagattgggctactataccccatttgaggtggtttgcctcaaaccccaccctcaaatccatcacgtttgaggtggattgccgaggggcttcgcctctgtagcagaccctgctcttaggtggggaaggtttgtgtttcattaggctcctacaggaactttgggtccttttcctgctcctggcctcagtttctccatctgtaaaatgaggaggaggtgggtgggaggacatataacttgtagacccaatgttatatggaaactagggtcctgggattgagagtttttaaccctgactgggaaccatcatccctgcagcatgtgttaaatgcaggttcctgggctcaggctcactaatcagagaatctctagggtagggcctctgagtgtacatttttggggcaatttagaaaagggagattaaatgcacagaactccattttgaagtacacagttcagtggtttttagtatatttgcaacattctgcagctgtcaccactccctcactcaaatgccccgagagattccaattgctgccggtccctccgggcagccctacaggtgcatgtcctgaggcattgacttggacccttatgtacagaggctactgaggctgcaaggccgctctcctggttggggttccctgctgacagcatcaggttttcaggccctttatgagtgaagatgagaactttctgagaggaggaagccagactgggggagagattgccctgtttccctgcaactttccagggcagcggaggtcttgctgcctttccctgtccccagtgccccacacactgtgagcaggcgggtagtcacttactcagagctagtgaccttttaagcctcagcatatggaattcttgtggcaatttgagcatcttacagccacgacacaggtacagtggtggctccgcaccctggagaagcccctctcccctttctcagcctacttctcatgggagtcagcatcccctcaccgccctgagcgcgtgccctctggtccttataatcccaccaatgtctggtttccctcagagcaacttggggtacctggaagcttcacccctaacagacaggcctctgtgagggtcacagtcttagggcgcgggaacaagttactttcattccaccttgtcaatgaaagggatgggcttcttcccagtgcgcctgccctggctgagggtgtgtctggtggtcttggccaggacactcacccttgggtctccctggcagtgagaccctgtacaagatcctctgcagcctcaatgtttgtggtcttgaggccccatgaggtctagccagcccctctggaccgtaattggtcgctctgaaaatgggattcagccacaattgaccccatttttgggaaggagtagctgattggctacgtactccctcataatgaagctcatggctctcagggtcaccaccagcatttctgaccctgtccacaatcagcacccattcccaggccccgagctgtccttaaggaagccagggaggttggtggacgttgcctttgcttagactgcccgctgcgctccctggcctgaggcctggctttgtttctgggcttgggtgctcttactgggttcttcccttaatcttcagccccaaaatcttctccctagagtcccccacctggagtccagcattccagaacagctgcccttccacagttagcatgtggtggtggtccgtgccctgaccgtgtgaccgttccctctgtgggcctcagtttccccctctgtcaaataacaggtcctttatagccccgccctgccatgtgtcaccctgcccttgatgtggcagctgcccagggaaggtgtagtgaatggatggatgctcccaccagccagagacccctccggtacctttttcctcgtgggatcctgagagctccctgcagtttgcagtgagagtggcagctgagttttctttctaagaagaagggtggctctgggctgggtagttatctcccagggcaccccccaataagccagtctcacaaggctgactcggactgcattctcttggagtagctgagcttgaatggtgaggagggccctctgggctggcatggagtcggtttctgcatctgtaaaatgggtacatacctgaaaaagcttttgtgagtgtaaaatgagatcacgtatgcccatacctcgtcactgatgccctcattatatagaaaagaggctctcagagatattaaatggcttgttcatccagccagttagtgaaggagctgggcccaagccctacctcaatagcatttcctctttcctttttttttttaaaaagcagtacgtgattcatgtggatcatttagaaaacaagaaaagcacaaaggaaaaacaaattacccttaatgctaccaccctaaaagaaaataattatattattcttcttaaaattatttggatgttatttttcctgtcatcctttttctttgcaaaatatgggaagtagaaatggtctctatgcagccaaatgaaaaagttcatatagctgttttgtagctcttttctcttagcaatactgaaaacattgtcttcaattcaacacatagtctgtgatttttgatggctgcttagtattccatgccatatttacttaaccaatcccccagggctggatatttaggttgttgcagtgactttttttttttaaaagaaactatcataaaacattgccgcttggtgagcatcttatgtctttgtgcacatcattggtgacttccttaggatatgttcctagaagtgggattgccaggtcaaaggccacacacatttaaggtcagagtgccctccggaaaggctgtatccgttttctctctcagctgccctggaggagagggccgggatcctgtaactcacaaccctttgctatttccaaaccacgagcccagaaagagtcgaaaaaacaaaaaccgcggctctgggagcgacttcctgccagaggaagggaggcatttggtaaatagtccactcccagtttttgagtgaatgctgtgtggcctgcctcgggccaggccatctgggaatgcactaaagagtagagaccaggtctgtgtcctcaggcggcttccatgtgcctcaagggggaagataacacgtgtcaggacacctggcaaacacctggaaggccaccggatcccaagtccaggctgagggtggggccatggccaccacttccactccatccacctccgtctctggcacctgctcagggccacgtggactagacgtgcagtgaatatttgttgaacaacaaaaagcagtgtgttacccacagaagctgattgtgaactccttaaagtaaggtttgagtcttgttcatggctggctacaccccctaagcctagagccgtgttgtcataaatacttggccaaatgaacaaaggctctgtgggaccaatgaatccaagaacgttggtagagtggtctagatcccagcaggaaagtgggataagccagtgtgctgcccacagccctcatcgccagtccctctagtgggtgctaggaagaactgggtggggagtctgggctgatttcctgtccccagctcctatgggacctgggcaattgcctgactgagcctcagttttcttaagggactagactttgttcttgggggctcctttctggttcttgccaagaatctgggtgcctgtggtcaagatggggactgggagagggtcaattgccaagaatttagccctatgggtccaacaagcctgccccccaccaggtgacctctggccagagggtggctgctttccagcccaggaccctgccctccccaaaacctcttagcaggaccctccaaggtggctggtggcacccccagggggtatggaaataaggtgatccaactcttccctggctgcccctctgttttgaataaggttgtggattgtttatttgaaagaagagaggccccagccacacatcctgcttttaaaatccggagttctagctgagccctctaggccctgagccccctacccgcactcctaccccaggtccctctttcacagcacccccaccccagctggcatgtcttctgcctggcagctccagatgcccctcccccaagagaggactctcctcaccccgacctggcttcctgggccccacttttaaacagctctcagtggtcttctcgctcctgttctcttctactcctttccctaaactccccttccccacgggtcaaggggaaaagggcttcctactccaggaggacacttttacattggcacaaacacccatcttagatgttctttgtattttggtgatcagactactgaatctattttgttgatgaggacaccaagtgttagaaaagtgatgctgcttgtgcagggtacgtggcacagcagtggcctggcataagacccagagtcaggctcccccccaagctctgcctccggcttgctgtgtgaccttggacaagtccctttccctctccgggcctcagcttgctcacccacagagtgaatgggtgggtggtagatgctctttgagttctttccacctctgtttctctttctagataagaaccacatggtgtgaagtgaggaggacctttcaattcctctgttttcccctgaagtcctgtggtaccccctccctcccttgtccccacttcccacagccagttcagagccagagacaaaggcctgttgcaggcaggtgtggccattagggatgtgtactagtgcctcgctggtgggcccggataagaggccgaggctccccaagcatcagccagagggtgctggggttgggggagatggagcaggctggcactgggctcaccagcctctgcccaccccttctggagcttccccaagccctccgatacaggtgagggaaggtttcgtgataaatgctagacttgctgaaagggacatggcagctgtgcaacttcggtgactcctgtcctattaatcctttgtgaagcgggagttttctggccccagcaaagctggaaccctcaaaaggctgcatgacccataggctctcctcctccctcctgtggggcatgtgggacgtgtgggctgggacgtgtggtttaaaggtctggaagttaaaggtctccctccctggcgagccagctctttgttccacatcctcaaggaccctgacttcagcctattgttccccctgctgacacagaggctccaagttcctctctggatttgctctaggggggtggggggtcctggtgttggccgtggaggctggggatttgtgcatacctgcttattaaaagtcactcactcattcagagaaaaatgctgttttgagacaccctcttgcatgtgggaggctgagacagtgactgctgaggtttttgtatcctgagttttgtcaagctgaggcctggacacttttggctgtggctgattttgtgtccctggtgggcacgataatcaaactgctcaggtgaccaggtagggtgaggtttgatttgacagcagctggcagaggtagtgcagagggctcgcttctggacttgaagttacagtgacccacaagtgaatccagcaagtctcccagcttcatgtgattcacagacccttcaaatcagagttgaccatgggggaataattgaatcccccagagttgggggcatgatccagggctccaaagggttaatcttgttttgaagtattaataagggaagagtatgtttgagtgactttctgggatattgtgcttttggacatttagtatgtcagttcttgctagaatagcactaatacataaatttcttctggcttgattttcattttacaaaaataatccaactaatctaattgatccagttgatcttccctgagaggatccagccaggaggacagaaattcttatctccacatggcaagtggggaaaatgaggcttggccagaggttgcgtggtttgctgtgtttgcatggccaggccagcgggatatggatgggccatgggcctctggctgccaaggcctggccttcccaccacacctgcccttccccatgagcgccttacctgccggtgctaaggagcctggctttgatttggactgcctccgtcagcaggaggctctggccagactctgcttccccgtggggaactaagcctgctcctcccggctggtctttgtgggccctggcccccttctcttctgggtgttccctcagggcgttcaggggcttcatggtcaggaggctgggagatgctgattgcagagcccgcctggcattggcaccaccccatctgcctactggcattgctgcttctcacctgaagctaattcccaggtagtttttaagactaggttagccttcctcggacactgactccacggtttcccccttagtcatacctacctaggataattggaaaatgaggagtgtaaatttgatagaggttgaacgaaacacctgccttagaatgcagggccaatgcaaatgacttggggatcactggacatcagggattgtctgtggtggttacttatgctctggccaccatttcgtcaggactgacagcagccatctgtccctcgtaggaacccttaatccttcccattctcacccctgcagagatggcctaaagtcttccctgagagccctttgcaccccacttctctttctccggcatgaggcagtggctgggggcgcacacagccacccccacgccctaacttgccccattgtagccagaccactccttccaatcatgagcctccctgggctccataaatcatcctaagagcacattccttgggggatttgtaaaataatcaaaatatttggggaaaagaccttaagattacttatggctattagtgggatccatatattttggcaccaagcatggcttaattgaaaaaatatgtgtgcttggtgatttcttcccatttttttttttttttaaataaggagtagccccagagagaagagtggttaggcaaaaaaatagggaggaattaaatatcagaagagtttgtgtggaggagctgtttacagaattgtggaaaatataatgctaaatggaaagtaagccgtgcctgtatagtccgggattattaatagagcctagttaccacgcacataatgaaccttttaagagacctgggacaactttcccctttgcaaaacaagtttccttcaaatagcaccattcacgcagctaagggcattgggttacaacaataaataaaaatgaacagtgccctgagaaattcaaggaatgcacaaacgtttcagtgatttagtatgagaaaacactatttaaacatttaattgaattgcatactttcatctttaaaacgttagcgtttgaactgccacctgaatctccctctcttcacttcattagattgcaaggccctttcaggggagggagttcctactctcctgcccttccccaggcttttccccttccctgctgttccctaacttgcttttgcccaagactatcaggaaaaggagactcgacgggagtttccttttaaagctatagggagagacttggatgagatgtgctcttccaaatattttatttgccaggacttgatatgagctgtagattcctggatcaatcaccacccctggggactcagtttctcctcagttaaatcaggaattcagattagagaactttgtcataatacacatgcccggtgcccagtctaattcaattggttccccaggtgcttctgttgtgccttcttggttcaaaattaccagagtgggctgggtgtggtggttcatgcctgtaatctcagcactttggggagactgagatgggcagattgcttgagcacaggagttcaagactagcctgggcaacatggcaaaaccccgtctctacaaaaaatacaaaaactggccaggtgcagtggctcaggcctgtaatcctagcacttttggagaccaaggcaggcggatcatgaggtcaggagtttgagaccagcctggccaacatggtgaaactctgtctctactaaaaatacaaaaattagccaggcatggtggtgggtgcctgtaatcctagctacttgggagggtaaggcaagagaatcgattgaaccttgctggcagaggttgcagtgagctgagatcacgccattgcactccagcctggacaacaagagcaaaactccatctcaaaagaaacaaacaaacaaaaattaggcaggcgtcgtggcatgcacctacccaggaggctgagatgggagcaaagttgagcccggaaggttggaggctgcagtgagacatgatagctccactgtactccagcctgggtaacagagatcctacctcaaaaaaacaaaaaaatttaatggagtggaagctccagagggcccttgcaggtctaggaaactagggggcagagacacagcgatcattgggcacttcctgtgtccagtgagctcaatgcatggtggaaggtgcctggttgaatcctcctgggtccagggactctgtgattctaatctcggctgatacctacccaaggaggactgaccccaggtggcacccccttttgtgtgccagaatcgagtctttgggcatggacagttgttcagagttgctgggacagtggagcctgctgcagattggatttggctctgaagagagaaagggaaaatcatgtgtcctcagcacgttttccagccctggcgaggttttgtccttccagattaatgtgtacacatgggaagcacacacagccctcacacacgtgttctttcctcagagattaaccagtggccctgtatcgattgccagcttaccttgtgggctgctgtgggggacgcagggggccttctttgcaaccctgccctggaatggtttgaagtctctttttacagatagatagcagagcaatgtgaccttgggccagtcaccactgagtaagacagagacatcaaatctagacacctaagaaaacccccttggtaccaaacccctctttctttgtgggtatcttcataaactgttgcatatcttagctccgagttagactgggggtgccttgaggacaaggacaagtgtccttctgtatgctcagaagattgggacattccatgtggccagtgaatgctcattgaatgactcatccgaatttcattttgctccatttaagggaacatcctctgagcccagccctgtacctggtgtggggtacaaagcagacccaagccttgttctcacagtgcttcccatcttttgagggacttggacttggctatggtatgatttatttggtgccaaggggcagttttcccaggagcagacctcgcaccaaaaattcaagtgcccggtttattgaggcggggggttgaccaggaaacagcagttaggagagtgctgggaagggaagagaaggggccagtgtaggtggcattatcaagccagctacttctgtgggcagtcggagccgaatcccgctgggaacttagggaagcaatacagaactcacccctgctatcctccttatggggtgagggagctgggatattaatcccccactcctggtgcatctgttcctggcacttcccagcactcaggcagagcaagcccctagcaggcagggcgagtcctaggacaaaagcaggtgttggcatttgcatggaattgggggctgaggggatgtgagcagagcgccggcagaggtgtttgctgggcctccacgtgctaggccatgagtaacccagagacacccccaccccctgcactggtctcctagagcagtagtttgttctaaggaaaggagagcccagcaagcccctgccttttggagaacaaatactgagaacgccccgtgcctgagattctctgagtaaaagcactttgcaaaatgttgagccttattctgcaggaagtcagagggtggtggtggtggtgatcatctttgctctgcagagagggctcagacctgcaggctttacctcctactccagaatccgaaggtggggccagtcccagctcggcctcttggtagcccgtggctctggtgaagctgctgaacctactcgcccaccaattgtgagccttgaatggtagtccatgaacagtgcctagtgcttagtgcatagtggatgttcaggactattcattcccactcccttcccttccaggctgatagtgcatgccctcccatggacctcccatcaggctgtgaggtggcacgctgggtgggtctattgctgcctcttccacaatgggaaactgaggcccacaggaactaagacccaaagccctggcctcctgagcccctagtctacactgctttcctgacgtggcaggcctgtgtcaaggtcaatgcaaagtgtgaagccagtggtggggaggaggtgactggccatgctctggctgtggccctcaccccgtcttcagtgggtcattgtgccagatgtttgactcaccagagcttggatgtctgagttgtccattctaccccccacacctgcatggtgccaggcacagagcaggatgtcagagctggagggactttggcgatcagccagaccaaacctttgttttgttgagaagaggaaacagtctcagagacaccagtgacttctccgagtcacacggtgacttagtgacagccagaattggagtcgggccttggagggccagcctgcctttcctcctactccttccgtaggaagctgctatgtaaggtatgttttattatagttgcttataaacataataaaacccccttcatttaatggcacctttttttttttttttttttcaggcagttaataatccagcttttcagttgctcctcagggaaaccattgagggaggtggaatgagaattgcccactttcaagctgaagtcattgaggcctaggaagcttttctgggtctcaggattcccaggactctgggactctcataggtcaggacggctgaggccagtgctggcagctttgcctctgtggggggccctccccactttctgacagaccacagatacaggaggagatcctcaggggagagccccgggctcatgctcagaagattcaggttcaaggccaggtcttgtgttggctctctgtgtaactttggggggtgttttgagttcttccactaggatagatggtcttgtgtcactctaccagctcttgcctctgttttcaaaatgctcacagttgaatggaagcagactcacaatttaaaaatacatacatagggctgggtgcagtggcttgtacctttaatcccagcactttgggaggctgaggcaggaggattactgaggctgggagttcgagaccagactgggcaacatagtgaggccctgtctctacaaaaaaaaaataataattaaaaattagctgggcgtggtggcacatgcctgtagtcccagctacttaggaggctgaggtgggaggattgcttgagcccaggagtttgaggctacagtgagctatgactgcatcattcgctccagcctgggcagcagagtgagtccccatctctttaaaaaaataataataaaaaaatacagaaagcttttataaaaatctgaatattttgctgtgggaactcagcagaattgcctaggtaagtgtgggaaggcttcgctgaggaggtgatgtttggcacaggagacagcaaggggcatccatggagaaggtacagggggacaagggtaacatttgctaaaggcatacatgtgctgcatgctttcagtgtgctgtcttactgaattctcatgacatacagctcttggaaggttgtttcattattgccattttgcaggtgaagttgaagggccccagagaggggaggaggcttgtttggggtcttgcagcccaggttttaaagtcccttgtcttccttcctcttctccacagcctcccatgcatttcccacaaaggtccctgaggcctgatgagaccctcccagtacttttaggatctgggatgtgggaaaggtgatgggtcctgtaagagggtgtgcccagggaggggtggggacatcccagtgcccatcccagcctgccctcctgtcaccccagtcgcagggatctgggcagatgtgggtccttgtgcgttgggccatctccaaggagccccagtggcacctccttgttcctgtaacgctcagcactgctgctctaggcaccatctgttctgttccctcctgcctcggctcccttgggtggccttttgtaagggtcttatttctgggcctgagtccattccatagatggagaaaccaaggctttgagaagggaagcgacttactcaaagtcgtacgtaccatactaggaactaagcagaactaggagtgagccttgtggctcctctagccttctgccatggtaggagggccaacgggatctaatacttgctccccaccttgcgcacctcaggcctcccttcctcaaagatcctcattgaacttgaagaggaaatttacatttttttttcttcctcttcttgccggacttcatcactcttttggagatttaggtctgagggaaacagccccagacagggagccaggactcctcggtcctggctcaggggtgccccagctggatgactcgggtttcatttccttgccagcttcctggcattgcctgccctcggaggccccaaggggcagtgtgcagggtgcctgggagctcaagttcagatgtcacctctacaggagtgacatgtaggtgggtggtcatgggctcatctgccctgctttgtaaaagtaaaaatcccatctcaggattgagttaagaatatacatagtaagtgctccatgaatgggtgctatggctgcctggtcttcaaaaacaggggcatatttctcattcctccggtctctccacctgactctgttgtattctctggactccttcaacctctgccactctcagtaagtgggccaacctcttgcttgtgctctcaaattaaagccaggggtcaagctgaaacttatccttgcagaaaggtcagacctttgcctggctctgggtgtcactgcctggggaatgggcaggctcttcctgtgctgcagaagactggaccgagctttgcggtattcaggggttcatacttgcatcttctaaacagcctcctccgaccaccttccacttgcacgtggacatacactgttcacccaggtcccttgtgtgaattacagccagtggtaccgggcaggagctcagtgaatgcgtgtgcccattttattttctgtccctcagcattgatactatgcggtggataggattcatttattctcattttcataccatttagtgatttctctgagtgccttctatgctgggctttgtagggttatgcagaatgaatgcctactagctgttcagcacagagttgggcattttacgtagagtgtctcccagaatccttataaccatcctgaggatgggatatgattaattataatccccattttacagatggattcactgcagctcagaggaaagttaccccaacagggtgggagctaaaagtccatttaaggcaacagtgaaaaggacagaatgaggctttgtggctcctagcagaggtagcagaggggtgctaggtaaggggaggctgtgtgggctgggggtgctaatgtgtctcagctcaccaagcagataagattccagtaggggctgagggataggctgctttattcttatctgtaatcccctcctctactgcttatttgctgtgtgaccttaggcaaacaccttaccttctctgggcctgtaaattactgcacactctcatacggtccatatttgttttttttctagaaactagcagcagatcagttgtgtgcagaaaaaaagctgtttattggttccagtgctgtctttacccttcaaagccttcctaagggtatgggggtgatggggaggagtcatggcccactacgaagggccactgccgtgttgaagaatcaccaccagtttgaggatccagcagaaatttctgtttgttcacaggacggtgccaggcaggttctcatggactcacaggcccagccagcgtggtaggctggctttacattgatcttttttagatgtgggggttaacagtaagattctttatgggaagagagaagtgagtgtgtgcaccattgccaaataagaaaacagattttttaacagccaagtagatgattccttctgctcaagtttcttttatgagaggcacattccaggtattgaaccatccttgaatgacaccacagggactgatggagggaaccctggattttagctatgaagggagaggttgcggtgctcagggtcaggatcttcagtgttgaaggctgtgtctgcaattgcttacgggttcatgaaatcgccactgcagctatctgcttacctgggctccaggtggaagagcccctagcttgtcccaggagtttcaggttctctgggttttacaaagggctttcctgtcctcctctccactgctctgctggtactccagggtctgggcagtggctgctgttgtcaccttattccagggctgaggacctgaggctcagggagcgaggagcctgcccgaggtgagcagcagggtcatcccagcaagtgaaggggcaatctcctcttctctgggctgagctgggtttggcccccaccactgtatggggcttcatgccgggggaacccacagtggggttaaacagaaaggcctcctggaggaaggaaaagattcccagagttctatgcttcaagtcattttggttaaaaaaaaaaaaaactaattagaggtgacaatggtgactttgtctgtgtgttcactttttcctccttcttccccacacctcccccttctccctgtccctcatttgttgtatccatgggaaaactaggtaacattataattactgaaaatattgtgggtacgtggaagctaggagtggggggtgcctgggagtgcaggaggccctttaaaaaaattttttttttttaggttttattttatttttttcctttcgtttggaaacggagccctttgcagtcatgctgtcacagttaaaataaggtttaaattacaggccagcccgtggcttttcccctttctttcagaatttttgccaacttgcaatttacttaatgaaatcctgctattccgtttaacagggatattttttgcagatgttgatttaacttagctttgcaaaatatgtgaactgtaccgtttcttttcctatttttaacggtttcaggattctagttcagcagctccactggcgctgccatgccaacagtggtgtttactcccatcccttgaaaatatttgttttccatcgttctgtctgccctcccctccatcccacatacccacaaaggggagggtcccatacacatggcagaatctgccagtggagattggggccagaagggacaccagagtttccgatagtccatcctcttaggtttgaggaaaccaaagcccagggcttaacttgcctaaaatcacaaagtgaattcgggcagagtggtttgcagcatgagctgtgtcctctggacagaggtgagggtggaggatgggagggagatgctccccttgtgtctgttttggctgtttcttctccctgggaagattccttcctcctcccctacagggagctttgggcccgatactcatatgttgggagggaagttctgcctcatgtctacctgagacggttgtggtgtagtggaaaaaaccctgactgggagtccttagactttgggttagcgatggggggcttctgctgctgactagctctggtgtcctgaggacatggcttaatctccctgagcctcagtttccccatctgtagtgtacgtgatagtcctcgtctcccgttcatgccataaggatctaatagagcgggctggtgtgagacacgcaaaacacagcagacgtccagggaacaaaacttcctcaccaactgccaactccaatacgcagggtacgggaggaggcgtggtgtgcagccccgacgtctccctctgaaggagtgaacctggtgtctagggggtgtcagacatagcaagaaatgccgctttcctttcagcttggggatcccctccagccaccctttccttaaggaggagtcccccacaatgacagaggttcatgtggactcaggagacagcggacacattatttagcccaggggagtgagcagaggcccagagatggtgtggggctggctggaggcagagctgaacccaggctcactcctgaggggtgtccagcaggaccctcaggctgggtctcccaggccgggggctggtctgccttgatgccggccccttctggcccttgtcccacagtctcttggaggtcctgcttagctctgacactctggggagggatgaagagaattctgaaggtggggccccctggcagaggcatgagggcagtagttcagtgcctggagggggtctggccagggctgccctgagcgccgcattctgctcacacagcctggatgccagaatgtccaccgagccgcgaaggaagtgctggcaggacaacagagtggcatggaatgcgctgggcatcctgggcaccggggtaggctctgcagacgtggtggtggtggcctgactaggggcagtagggacagctctcaggcacgtgtgcctacctcagacagcactttcccgtggccaccagcagagcccagaggggccagcttcttgttagtctgatggagtgggcgtgggaccctccttcaagcgaattccacatttactccatggatagaaagttgttgtcattgtgtgtctgcgggtggacgcagtggcaggaaagtgtgactggaacttttgctgacctgagaattaaccacagagatccctgtatattcacaactcttggttcttgaaaactcttttttattattaatatgaagtaatacatgattaagcaagaaatatagtgacattctctctatatagaatttaaacactgctaaagcagaatcctctctttcttccccatcccagtcttctcttgagagggaattccaaagcttggcaggatggaaacaacaacaaaacatgataaatttcaaaaaacagaacagcatggcaggtccaaatactcataacagtaaatacgaatgtgttaaaataatctattaaaagataaacactctcagggccaggtgtggtggcttatgcccgtaatcccagcactttgggaggccgaggtggacggatcatctgaggtcaggagtttgagacaagcctgaccaacatggtgaaaccccgtctctgctaaaaatacaaaaattagcctggcacggttgcaggcatgtatagtcccaggtactcgggaggctgaggcaggaaaatcacttgaacctgggaggcagagtttgtagtgagctgagatcgtgccgttgcattccagcctgggtgacagagtgagactctgtctccagaagaaaaaaaaaaaagataaatgctctcagattttgtctttatgcatccagctacatgctaatctagaagagacacaccttaacaaaattatggagaaaggttgaatctaaagggaatgggaaaagacatagaagtcaatgctaaagaaaaagaaagcaagaggagcaatattaatatgaagtaataatatttcaggcaaaaaagcaggaaccaagaggttcagagcaaactttttctgtaaaatggatagtaaacactttaggctttgcagggcacacagtctctgttgcaacaattcaactctgccactgtagcccgaggacatctatagataatacataaaacaatgagtaagcctacgttccaacaaaactcggtaaaaacagctggcaggccaaatttctcttttgctgattccttatttatatcaaagccaaaatgatctgtaaggtataataatcaataatctttgtacacctgacaacatgtctttgaaatacctaaatcaaaaatggacagaaataagagaatttgataaatccccagaaaagtggggctttataatcatgctttcagaagtgcacagacctactggacagagaggaagagagagagagagagagagagaaatattcatgaacaacacagcaaactttttttgtttcaacagcttttggggtacaagtagcttttggttacatggatgaattctatagcgatgaattctgagattttagtacacctgtcacctgagcagtgtacactgtacccagtatgtatgggcacttaggtcagttccatatctttgtgactatggattgcagcacagtaaacttgatgatctacatatgtatatctttatagatgctcatcccaccgtgctttgttggatcttcgtttactccttttattttttaaactagagtgatctgtcctacctctaaataggcttcacaaataaagaccaggaacaaaagctctgaatcttcactgctttgtacagtcctagagtttgcacttgtagaatccacttgtcttctagtattattcacattcacttgtcggcaccaggttggatcctgagatccagaggtagtgtgagcagggtccctgccctctgttggggtgtgcatacctgagattgggaactgtttgggttctggctctccttgcccaacacaggtgcttactcctgaccagatagtcaaggcccggcatggtctggtccccaggcggcctctgcagacttttcactagcccttctgcaatctggtcaaacgagacctttctggccttgtctcctgcccgtgtgcctctgcccatgccgttccccaaacctggaatgccgcttttcctccccatccctcccaccctccccgccactgcactcagccttcaaatccttgattgttaaccttccttttctagatggttgtgatgtctctgtgttccttgcctcactgcccctcatttataatgctcttttgcgatcacaccctttcttcctgttggacttggagctttgcaggcagagatgtgtctcggtctcctggtgccccatgcagagcagtgcccatcatgggtgctaggcagtgcctgtggaatccagagaagggaaggaaggcagcatggggggaagactccctgcgtgccagagcagaacagtcagaaacctgtaccgccggtgactttgaaaattaagaacatctatgttgtagggttgttgtgagaactaggtgtgcctggcacatggcgggctcgaaggactcgtcagtgattagtactttagtccctttccagtgattcatcctcatggctgctcctgatctcatgtcacagttggggaacctgaggcccagagaggctgaggcattcatcccagacacacagctaggaagtggcagagctaggatttgaactgaggtccttgattccaaatcccacagggaggtgcacactgtcccaagggcctgtcctcaaacacacccagacacactagtcagggccatccgtgacggctccagagtgtcgccttcccagccagtctcccaggcctggcgctgggaccaaccacgtccgtctcatgctaggaagttgacttggtttggtctccttcctgcccttgtcatccctccctggaggaagctaactccctccccaccatgccaggctgttgaaccctcctctcgagggatcatgacatatcagagtcagaaaaggggcctcctaaatcttgttaaaaacatagattcccgggctccacccaggacccatgaatgagaacctccaggggcggggcctgggaatctggacacgagggcaggagaaacactgcctctttaacccttttatttttcagttgaggaagctggaactcagatggggcgtctggattgccacgaggtccagtgagcctgagagccgggaaaacccctctctggactcttacctggtctgtggcttctgtcacttcctagcactgtccctgtccctcctgccccacccccagcctcagaatctctagcagccccgtacaatggaaggggttgcgaacgggtgtgcagagactttctggaaaccaagctctgctctcagacttcctgtgtcttacaatgttatcttcagaataggaaactttgccccatttttgcaacgcacatcctttgcctgagagttggtggtggtgctggccagccagggcgggtcactttgcaggcacaggcagggagttgttccgacagcgatgtgaggaaggactctctcccttctacccacaagaacaaataaacagaccattttgcaaaaataattcatgttggctggactcaccaggattatttgtctccgttccttgggcctggtggtatctaggacggggggcccttcctccgaggcagcagccctagctataaggccctaccctcctggatgaccttggatgagtgatctctgctctctgggccttagttccctcttctgtaaagggaggaggtcaggctgaataatctctagcccagacattcccaaggaatcctttagattcccctggcttcctccacgtttctttgaaatacacacgcccttgctgctagacggtacattccacggcaccctgtacttttcagagcttttaccaacccaagaatggcatgcccacctcaccccatgacattcacatggcccactggggtggtgtgtggattccccagacaccagagtccattttgaattgggagcaaggaagtgacgctcagaactcccaggctgcggcgtcttcaggcttgcagtcagcttagccctaggcgactgctcacctcctgcaggccagcagcaaagaatgtttgtgttcttcttccagtctgagggagggctattttgatgtgagagaaaaaaataatgcgtgtatagcccactaaagaacttggaactgaccagaaggaaggaatgatgtttacaaaaacaagagtctccctgatttccttggactcccccgttattttctcctcacttccacctccagtgcctcccttgccgcaccatcaatcattcctccagtatgcctgcgtgggtgcatccttgcacacagtaggcgcttagcaagcgggtgagaggggccctgtctcaaggaaacgcctctctggcatctcagtggcacttctgctggctgaaacccaaacccacaatgagtggttcttgaaaacatcctacccactctttcccctcagggaatttgcttccagggtttctgggtggagctccctgtgttcaaggcctgggcagccctccgtggtggggtgggagcactgtcgggagggggcactttgggggaggcagaggtggtcagactccagcaagaaggacctgctggaagtggttcttggtgggtcttcacaaataagtgagttggtctgcctgttttagagtaaacgccatgagaggaaagagggctgaactcagtggatgctcagattccagagatatagataaagaatcccttccatcaactgtaccgttgattaagggtcagcttcagaacccatggtgtctgtggaagaatgtccatctggtggtaggatgcttgcacagtgccaagccccaactgtggtgtttttgttggtcttacaatagcaatttttgaagcccaaggggaagatgcagaggagttggtagagggagagagaaaaaggagttcaccaatatacctggcttccctgtcccaaaggaggagttgtccccaaaggacacagcagagaggtccctgccagtcttgggatccccttctgaggctgcttccttcacgcagtgggtacagtcagggtcttgctgaaccagaagatgtccaaagtgccctcaaggcaagcagcagcagggaccccttgcacagtgggctcagtgagatctgctgagcacctccagaactaggagatggaaggtggaggggaaaagagcaatcttccagtctggtggccaggcctgactccctgcccaaggtcagcatgccacttggaggtgctctgcactcctcagggttcctcaggctggtgggctgcagggtagcgccaggacaggggcaccctggggagactggcggctctgggtctccctggcatggctccagcccccacgtgcccagagacacaggcagttgctcctgacttggtgcccttggggactggcccagccggaacctgccattctctcgtcagtgccgcctccccgacttggcagggccgtctccttgagctggagcagccctcggtatttccagcttggccccctgcccacctctctggggccttgcagtctgtccctctcgggccaggaccgacgcaccctctccacgcgatggcttcacagcctcgcccagggcctcttcctgccactccacactccccagcttatctggggcccctcacctctgtcctctccagggttgaaaatgctgcttcctcccagggagagaacctggggcccagctaacatgtaaatcaccaaggaagccacaaacaggctgtccttggtttacctactgcagttaacgcctgaggggttccacacaggggtggggccccaccctgcccatttggaaaagcccgagttggcagagccccctggccaaacgccctaggcaacgctgcttcttgaagatgggcatggagataactgggtggcatgttggcatgccagagccaagggctgccactccttcctgggcagccactgactaccagagcagggctgaggcgcctcggccatccacgggacttcccttccagatacacagagaaagaacgctgacagctcaggggctcctcaccagttcaggctgagtgagtggtgggtgattggaaaggatactgtctaagaaaccaggttttgtgatttccaaatactgtagactgtgatactaactggataatatttcccgttagaggtcatgcagagatctgctttcgagagcagataagagcgatttgtaattggtatgccagttgtttatatagtgctaataggataaacagttctcctgaaccttatttatattttgcatttgtttatcaaaacttttttttttttacttcgacccagctgctttcggaattattacaaactctggatttatgagtcctaattaatggtactttattgtatgtgcacaataatttatcttggtgggatgcgtgctttatccgaaagcctcagtatttagggaagagaagccaagagacaaaagcgtcccttcctccctagagtatatgaagatatggggccaagtcatctgtcttgtcacatcaaaagcagatataacatggaatgcagaaagcatgagatttaaagatctttcctagactatatatcctaaggtgctgagtccttggaactcacagttgacagctcggtggatactgtgggtaaggttgacatactgtaagctgtgtatgggcccagaggagggaaatgaccaaaaggatactaggatactcgatggcatttaccacgtaagtgttcgtccttgctatgataggttgctgccatcatttttgtccttctttgatctcacggcttcattttgtcttccatccagctagcagcaaaggttcagcattgttgctgacatcaagtacccattctaacttgtaacttaaaaggagggaaagacctttattacttttaggaattaaagacactgctcagattccacccctgggtttcaccgccatagggctccatttcacgccaaggctggtccccttgtttctcggggtgtttgtccatgcaaaggcctcctgaaaacttgacccagcaaagagggatcacactcccatcctctccctcaccacccctgaagatgcttgaatgactttaataaggctgagttgcagccctcacccctgttatccccactaccccagtcacctggcactttccttcagccagcgaggagaaagcgagtggatgaggtgagaagcagcacctgctgtggctcaggctcaggacttcttttttttttgagacagagtctggctctgtcgcccaggctggagtgcagtggcgcaatctggctcactgcaacctctgcctcctgggttcaagtgattctcctgcctcagcctcccgagcagctgggactacaggtgcccgccaccatgcccggctacttttttgtatttttaatagagacggggtttcaccatgttagccaggatggtctctatctcctgacctcgtgatctgcctgccttggcctcccaaaatgttggcattacaggcgtgagccaccatgcctggccaggattgcttcttaactttaagtcttggtgtatccctttccagctagtaagaattaccagaggggagagctcattgatttcactgattactcccttcctacacaaacacacagaccactgccttacttgatgggggaagatctccccatttcacagacaagagaaaccgagtcacattgtggctttatgatgatgggggcatgcaggttgggttggtgctatgggatagagttgggaaaagcgacttctgggtattcgggttttctgctgttatttttaactctggtgttagacgtcctttcttgcagcagtagccacaacacagggctgggatgttgtgcgacacttgatgtaactcaaaagtcccggcctgcaagttccccactgaggaggaagtggttaggtggccaggaatgcaacctgcgcctcccagattaattaataattgagagctggcccccagccagacggagctgagagagatacagtgaacaaagagtggttaactacagtgggggaaggaaaagtttgactttgcctgtggctaaaagggaaattcacaatggccatgatttatgggctgaattactcaggatcctccttagtgggcatgtgctctaggaatgcagacgctggcagcctgcagggccatttgtgcccatagggaagggaggtggaagggatggggggcagggggcaggcgccagcctcgtagaggaggtgcaagtcacaaccgtgggagatgtcagggagagggactgtgctgactgcctgttggaactaggtacaggctagaagttgagcaccgtccaggacgcactctgtgaagaaaaatggcaggaagaatgtctgagggtctggctgccctgggtttggattggggcttgtcagctgtgtgacttaggctgggggtttaacctccctgagccttcatttcctcctctgtaaaatgatacctgcttcctaggattgttctcagcattaaatgagatgggatacgtggacatagatgctcagtagccactggattcccacaggagacccagtgagaacagagggtgtctgaagcaacctaaacagggtccctattagtgaatctctgccaatgtttgctgggcccatgcatgtaagttgcctgctgggtagaccccagcaaggcttctgtgtgattcaggaaaggcaccccctcctctcacctatcacacaggtccctgtagctgcaaacagccctccggagggggaaacagttctagaaggcacttgggcattgccatcatcgagttcagcccagatgtctccctgggactcttgtcttttctagaagaaatccagaattatgaactggatcatggaaaacatagcatgcccatcttcactgaaaagttaaccttggcaataaaagaccaaatagaagccggctgacagttgtgatcactgccctcatgttattgctgtgttggtgttagtcacacagtgtgtgctcttatccagacacaggctaaagaattactctgagaaatatgaaactcttactgagataatgattcaacttcttcaagatgctgggcgggaggcagtggcattggaaggagcatctgatcctgctttgtcattaaccttgtgggccatggggtagtcaccaaacctctgtgagctttatattccataagctaaaacaaggtcatttatgaatgggcttgtagaattgggaaaccttccacagttcaaaagaacatcccaccatcaccatcaatgaggatagaactgccttcttggcatgggctgtgggaaccaagcttggcctccttctgccttggaaaccagtcttggacttgggatagaggtgtgggtcctggggtctctgtggggctgtgtctgcctattagcctggtgggatggatatactggttagctccctccctcctttgcacccttcacccctgatcattgtaacaagccagctctttcctggcagcttgggagcttgggcatggatgcgtcaagcagcttcaacttgcctgcacagtagcacagtcacagagaatagacgggtggccatggcagagccatgtacttctgccaagccagtagggcattttgcaacatttttgttgggaacgcttaagtctcatgttactgcattctgtgcagcaaatattagtatttaattgtggattaataatctctctagtcaatattagctttttgttaattataaagcattccggtttgttccagaaacacacaagaatgatcgaggcaatcctcactttaagaaaattcagtatataggcctctgcattcaccagagaggtgtggatcatgtatttttgtataacaaaaggctattttaaaggaaaggatttaatgcaggaattattatctaatgtcccacctttgtacttttaattttggagtgattatcccaagctgcatctttttttttttttttttttttttttttggagacagggtcttgttctgttggccaggctggagtgcagtggtgccaccacggttcactgcagcctcggcttccgaggctcaagcaatcctcccacctcaacctctagagtagctgggggactacaggtgcatgccatcatgtctggataattttttatttttttgtagagatggggacttgctatgttgccagggcacatcttgaactcctgggcgcaagtgaacctctcaccttggcctcccagagtgctgggattataggcatgagccaccatatccagcctacatctttagtgtaaatcgaggcaggtatatttgatttgcaaaggtcacctgattctgtctagttggtaaattaacaaccaactggtgttagatatgaagcttacgtttgagagctttgcaaataagaaaaccagcttctccacccattctttggctcttccattcaaagctatgttccctgttccatttactttcatagacttagcaagccagagaaattaaatccacccccatggccaggtaagatgacttgtagactttaggtgattttattttatttcattttatttcgagccactgaaacaaggctcacacatagtaagctcatttgccattctgttaaccaggctgcatcaggaggatcagcaaatggggacaatggttctcctcacctacctaacatcctgacctctgagcatcagtagtactctctgttaaatggcaacaataattgccacagtgcctttttcaaacctggggctgggtttgaaaggaggcagatgacttttcaaaagcccttccagcctttgagttttcatattcagctctgcattgccgagagcacctctgttaggcgacatagtaccaggtccttggggaggagaggggagagcaagccagctgaatcccaggccagcctgctggtggatgaattggatggagacacgtacccttctgttgacagcataaatttgagtgtcacagaagaggggtgtgtgattcagacccaggggctgaggaaggctttccaaaggaagtgacagtggtgtctggatggttaagcaagtttctgacaagtattagggaatggggaaagaaactcctggtcatcgagtgccgggtactgttgtcaagcccttctcgaaaaccccttaacctgtgagttaggtaatcacctagaggaaaccagcccctggcagggccgactccgcgggtgttggatgtgtggggtaactgagggctgctgctcacagaggtctctgcttaacgtaatgctgtgctttcaccatcttgaaaatcttcctaattttgggacaaggggccctgcgttttcatttttcactgggccctcaaaagtaggtagctggtcctggttctcagagatgtggtcacctgcccacggtaacatagctgtgaagatttgcaccagttcacctctccatcatctgtagtctcaggaagcattccagatcaagagagtggatggatgaaattcacactgggtggggtgttcaaagcccagggagctaagcggcctggtggcaggagatggtgaggccaaggatttgagggagctgggctgtgggtaccttacctggttaccccctgggacatttctacaccagtgtgggtgcctgttcctgagagctgagacaggctaattgagggcaatttttaggtactttgcttttatggctttatattaggtccaagaagaagtttaaggcaggaggtttgccaataaaacacattgtatttgggaaataaaagacaattagaggtgcctcaagttctctcagctctgggaacctgcaagatgaagtatgtgcccaaagaagggctttttttctttttttgagatggagtcttgctctgttgcccagtgtgcagtggcgcaatcttggctcactacaacctctacctcccgggttcaagcggttctcctgcctcagcctcccaagtagctgggattacaggcatccgccaccacgcccagctgatttttgtatttttagtagagacagggtttcaccatgttggccaggctggtttcgaactcctgacctcaggcaatccacctgccttggcctcccaaagtgccgggattgcagccgtgagccactgcgcccggccgagaagggctttcttgaagcctaccatcatctgctacaaactagcatccctgcacctctgatgcacacccaggctgtccctatctgaacccccaaagggccaattttgtctctgtggtctcagattaaccagggacttcagggttgggttcagttggtgaacttgggcatttaatgcctgagatgagaactcaggcccagcctgatgtaagaaccggcgcggcctgatgtaaggccggtgcgggcactggtttatatgtgatcccagcagtttggccataagcagtgcagacccatggagctgggaggatttgggggccccttcccatttcacaactgccacctggggaccgaggtacccagcttcattgtcttgcacactgttattttagaacctttccaggggcaataatgaaagcaaggctttcccaccccaggtggtctctgagtaagaaaacaaacaaacacactccagagtccgactttatgataaaacaaaagaggacttggaatgggagcaaagttcagaggctttgttacagaaactggttccttctcaaaacgtgggctgattttataatctgcttatcttgccctggctctccctttccaccctccttccctctaggacacagggaaccagagttccctcacctgggctcctttcctccccaagggcctgagggggttccctgccttgcttgccaggtggtcttctccttttcaggcttaagtagttgcagtttcttttaagagggcagcaccactgtttctggcacagagtctgatggatgagtcctctgatggaggagatagctctaccaccagcctccgcgtggctcttcgaagctatagctgcctgcggagagtgtagtgaagggagcttgtaccacagagccccgggacctggagagaaaagccatgctgtctgggcccagggaacctggaacagtcttagcgggtgggagacgatctctttggcatggccagaccggtgagctgcaggtggagggcaggtagaggcgtgctgatgggagtggggcctccggtttcatcctctggtgggtccccttgcccgttggagtggtaaggcctaatatctcctggggaaacggtctatggaggagacactgagcaggcctgtgtagtaggaggacctgggtgaataaaaagcttgttttgtgtcagggttgcaagatgagttcatctgttcaggatttgtttgaatactgcaagagataaaagaatggaaaccttacccatcacagcccaggccgccactttgttctgccagagaggtggggccaagcaggctgcagtcagggcgctgaggctgaaagaaaggcctttctgcagagaaaagccggcagaaaacccttggcctccagagggctgggtacagcccagctaggtggccaccgacaggataccccagatcactcctaaacccctcctgcgactgggggactctgaggaccacccaagagagctaagggagcatatgaggcagcaccaaggtgggctcagggtcgggattcctgcgctgcactctgactttgggtctgtcctgaggatggggatgattctgcctcctggacttgcacagttcaaaaaggatcatgaatgaagcgtgtagagcgcctcccacttccctgggactagccggggctagcagccctttcccaagatcaattattatgattgtagcccatctacaaaatactcatttttgtattttagaagggtagaatgcttgagtgtgggggagaaactacactcaaaagccaaaaagtgtgtttccagggctgcatagggtaccagaaacagctgttaaggtgtgatatttgaaaagcccaccgccctcctaggaagatgggcagcatgtcgtggggcagtgtcgttagcactgtcaccttcgaggatccctcttcacgtccagtgtttgcagaacccccacgtggcttggagtggatgtggctagcttcttatagcatggtctctgtgccattgccctgaagtcttctgggattttgcagcccacaggttgcagccacaggagtaatgcaaagagtccacatctctaagcctagatagatggaagctcaaatcccaattctgcagcttcctggctgagaggttggggtatgtttccggactttcaggcctcagctccctcatcttaagatgggagaattaacatatgttcaggtagtgcatttaaagggtttcagacactgcctggtatttggtaaaggtttcttaaatgtgagctagtttattatattattatcgtgactattattatttccccttgattctcaactccactggcacatattatgtttgcaggtgttactactgaatatgaatacccttatgaactatacaggctgagtcaatctatcatataatttatatacacatgtagataaggctgcatgatagtaataatattagtaatcataatagctgttaacttatgcagtgcctattttgagccaggcattatttgacacacttgaaattaatcccagcactctgatgaagtaaccactgattgcatccctgtgttacaggttaggaaactgaggcctaaaagggtgaagtcactcgtccaagatttcacagctgctgagtggcagagctgggattcacatgcaggcacctttgctccctagtccattcttttaaccctgtgcaggagacatcctggtcccagctgtgtcgctcatttccactgtgatcttggcaagtcacttcacctctttgagcctgtttttgcgccttggccatgtggacggcatgttcctcagtctccctcctcctggttctgtcatgctgccctcctgttcccatcacactccctgtcttaggggcatccctccacccccagccgactagctgagcagctgcctggagggtggtggccagtgtagagaccagccgccaaaagagcccctgaggtgggccctgtgcaggcaggctgcggtggtggccagaccgcccgtgatgtaatgaccgattaggaacttccccttggaagcccggcttcctctaggagccaaaggtgctggagctgaggtggggggtggggaggggtgggtgggagcgagtaagaggaaactcctgtcagctgggcccagcgtttggaaagagttcagcagagaggctcgttctaagctgttgaccattaacatggccctgtacacattccttctctgcttttactgccggagcccggtggataaagaactggtcttcccctcccttcacaaagaaaagaaaaagagcctctaattaatgctgcatctctagacttgctgcaaaacctgaagccatttctgcagcttaaaatgacaaaggagagttaagtggaaactcctttttccctctaagtttgataacaaaaactacttatctaatgggcaaacaaggctttaaaaggggtgttaggttaaccagatgcagggccacgtaattactcccaggcctgggagccacagatgaaaagctgccggttggactggaacttgaagccacaggcatgacacgggacagaagaaaggagttttccaggagggcaggaggcctcagtgcagccctgtgcaaaggggattggaaaagccagccctgggccccttttcagctctgccaccaacttgctgggtgaccctgggcaagtcacttaacttctctgggcttctgagactttgaatatctcttcttcgctcttggtagggtctgggcctgtctgcccttgtttcaggcccatcaatgaggggctgagcaggcccttttggtccagccctgggagagccagggaggttgctatggcccaggtgggtgtgaagcagcagcaaagacttggaaggtgaaggagtagggaccgcctgctcccctgctgacctagacccctgaagacccagaggactcgggctgagcctcccacgaatgccctgaacctttgagtctaagctgggcacaacgctggttccttcaggggtggctgagtccaaggcagtctggccaaaaggaaagcggggagccggaggaaagcaggctgcagtttatgctcaggctcttggagcatgcagcccacgggggagcacacaggaacgttcctgccctttgttttgacagagaactgctgattcgaagaagcgaaaaggcttttcttgggatttcagcactccccgcctccctcagactgcagtcagctcccttggtgtccctgcacccccacaaaattacatgttgggctcgcagcaccctccctgggcagagaggcgtagagaaaagaatgccagccatcagaggggccgatttctgtgcaggggagaaggcctattgttgggaccagtcaccacctcctcctcggcgcagacagccaccaccctctggtggcaggaatgtgggtgccaccgggagggaacagggcttgtcccctgggccactgtggagccctgctggggccgctctaggacagccacaggacattgccactttcttctttttaattttttcaaggtatcatacctaaaatgaaatccaccgttctttaagtatccagggtgtggctttttacagcacagatgcccaagttcccatggttccagtcaagaaataagatatttccatcatgctggaaagttctcttgtgcctcttcccagctgtctccctctccccaggggtaaccactattctgatttattttattttattttattttattttattttattttattttttgagacggagtttcgctcttgttgcccaggctggagtgcagtggtgcaatcttggctcactgcagcgtccgcctcccgggttctagcgattctctgcctcagcctcccgaatagttgggattaaggcgcccgccaccacacccgggtgatttttttgtatttttaatagagatggggttctgccatgttggccaggctggtctcgaactcctgacctcaggtgatccacccacctcagcctcccaaagtgctgagattacaggcatgagccaccatgcctggccactgttctgatttacgtcgccgtagattagtttgccttttcaagagttttgtcttggtggaaacacaccgcgaaccctgtgtctggcctctcgtgctcaatgggatgcccttcagattcatgcaccttgttgcaggtttcggtagcttgttcctttttcttggtgagtagtgttccattggctggatgtgcctagtttttgtttattggttttctgttgatagatatctgagctggtttctgggtttgggtggttaggactagagctactagtcctagcaacattaactaaatcacggaaatttagagctggggagagtaatgatctcattgttcggatgggaagactgaggccagaggagggagatgacctgctggatcagggccaggaggcaggactcctcccaggctagtgccactctgccagatccaccccagacacagctcctctcctcctccccctggaaccctcccagcaggacccagagtctggctgggaactaggccaggccctgagcagggggtagtgagcgggagtttcggtcagagctcggtcatctttgatgttgttcactcgtgtctgactccttggtatttatttgcaattaaagagctggttcctaattaggctgatggccgtgggagatggcagtaccacagcctaggaaccacgaggagaaaaagatccttctgtaagagactgtcccctcacctgagtggcagcccaggcttgtgactgagaggcacagggggagggggctgtgcagctgtgggaagtacagagtggggaccatgggttagggggtgcccaccttctcactcatagtgttgcagagcacgtcagcttgtgttggacacaccgcatgaaatctgaatgcacgtatgtgtgtgagagaatggagctaaagcagggctcattctagacattcagacatttgttgcttcattcttccattccttcactcactgggcacctctttcaccgcaggtgccaggctaggggctaacccctaacatttgtaaagtgctttgcggtttgcaaagggccttgtcatccacagtcctattgagaccttccatggcagtgaccctgggccatgacccccaaccccactaaagatccctggcctctgaagggtaaggccaacactggagcccgtaaacaaggcacctccttccttctgcacccacttgattttgccagagtttccagaaaattcagagatggactgtggtgagtggggtacttaattattgaatcagtccttttacaaatacagagactgaggcttggagacgtttagcagtttatcgatggccacatatccagtcagtggtggcagccttaggtcattctcactgtgaaaccttttggaccatgtggcatggattagagtagaattctgggctctcaagttctggccctaggtctgccacctgctgctgtgtgtacttgggcaagtcccttgacgccccccaggatgctatctttggggcaccagattattagactccattagtggtcccaacaggccagtctcaggaccaagttttcattggtccatggtgacagaaataaaaataagttagaaaataagtctgtacatggcaaaataaagcggtggtagtctgggtgagcagtggctcatgcctgtaattccaacactttgggaaaccaagacaggcagattgcttgagcccaggagtttgagaccaccctgggtaacatggcaaaacccggtggtgtgtgcctctaatgccaactacttgggaagctgaggagggagaatcgcttgagcctgggaggtcgaggccgcagtgagccatgactgcaccacagtacttctgcctgagtgacagagtgagaccattgctcaaacaaaaacaaaaacgaagcagtggtcgccctgtgtcattcccaactcccctgttaaaaacatgtgttggtttgtggaagcctgaagtgttgggtctcactggataagataatgtcagcggatactcgagctctgacgccctgggactgagagttgagtggggacagggaggctgagtgggtggcttaccctctggatcagacaagagaccccagtttttgcccaccacgcttcagtgccctagggcctgagcccagcagcctacctgctgggcaggattccccgtggggtgtggggtgggggcaatgtctaggcactgggacatattttatttcctgtccccttcccttttattaggttggtgcaaaagtaattgaggcaggagggtcacttgagcccaggagtttaagcccagcctgggcaacaaagcaagacctcatctctacaaaaaagcttttgaaaattagctgggcatgatgatgtacatcgcagtcccagctattcaggaagctaagacaggaggattgcttgagctcaaggaatatatgcagccctgggatagatggagacccacccctccccttaccagtcagagagtgtagaccaactggggggcactgaccaggagcgcagacacctgttaaggccaagggaggggctgcagttcaggtgccccaggaaggagaggtcagagagggcttcccagagtggcagtctgtctccctgaatttgggagacatggccaggagcgcaggcctgatgatgtgtaacccagtctgttcaaccaaggaagccgcaggggatggggcctggctcaagcccagggtgtcccttagctggatggctggggcaggcaaggcctgaaggcggctctatgggttcatccccagtcatagggtaccataaggtgtgctggggctaggctggggacatgggttttgattggggggatggaaggagtttggcctggctggggtggagggaactgagaggagggggataggaagtcccacctgtccttgaattgaaaaactttcttttcttttcctttttttttttttttgagacaaggtctcactctgtcatccagattggaatgcagtagcacaatgactgttcccggtagcttcaaacttgggctcaagcaatcctcctgtctcagcttcccaagtagctgggactacagatgtacaccatcatacccacctaatttttaaaagtttttttagagatgaggtcttgctttgttgcccatgctgggcttaaactcctgagctcaaatgagcctcctgcctcagcctcccagagttcccagccagaaaccttttggaagctgggaaagagaaagtcgcttcccctgccccctgtgcccctgtccttccccagctagactctccctttttccatgggtggggcagagctgtcactctgtggctgggcagctgtctcagagccttgtctgtgaagaggtgcagcagtgacccctcccttagtgagacagtaaagtgagtcctccaagagtggggatagtgacacctcagcttgtaaatagtaacctctagggctcatggaccatgagagcagtcatgcttacatatagggaaactgaggcttagggaggtagagggacttgctcagtgtgcaggttttaggaaggagccaggacagaactctatctggagtgtggagaagagctcccctctagagtgtggcctagcaccaaggcggccccagcattcactggtgtataccctgggcctcagtttcctcacctgtggaatgggctgctagtagaggtgagatgaggctgttgtgaagaacgggcccagctcgtagaaggcactcatggatgccgttgcccgtcctgtctcccagcatactccaggcatcgcttctttgcatccccaccttgctgtgcctgacacactcgtggaattcttgttggttggtgggcagtgtgggtgctgcagtttcgtggctaggctggcatggtgctgcttttctggcccttggggactcccagacctgtgccaggtagatggctggggagaggggcactggagtggggtggctggggagaggggcactggagtggggtggctggagctcagagtctggctgttcccagctgcccacctgctgggactggcctgatgcttgcagcctagtgacctcccaagggcttgagctgtctctgtcactattgcccactggctaaggggcagttctgtcgagggcaggatgcaggacctcttcctcctctcctgaccatcagctggaagcatcagaggcctcactggagactctgaggcaaaatgatccaagctgcgggctggtgtgaggacttggattaccccccagcagacttggggacctgtgtctgggacctcagtgccaggcccaggacaaggggcacactcatgaaacctgtatccagcccaaagccacagcagagcagtcagcctccaggaggcccctgaggcagacagcctcctgctgggtggctgggcgggcctcccagtgtgtaaggggatgtcaggggccctgccaccctgttcttctggggcttctaggcaggggcaagaccaaggcaaaggcgtccagagctggcctcactcaggctcccaggtgaagctgttagaagtgttgtcctctgggatttggttggactttgatcagttttcctcagaaaaagagccatgaattgctttgctttgctctgtcaagcctccagcagaacgcctccctctgcacaggcccaggccagagacctgtgtggaagcaggcatggcaggcaaatcatgtcacctcactgggcagttataggtgcctgcctgcttctcagagctgtgagctcaaaggaaaggccagatgtcagaatctgagaagctggccacatgagagcagggagcaccctggcctgtgttggtctgaactttggtctcagaaaattgttaaactcctccagacacacagacggcccgagtcagtgacaagggatttcagtaacatcttagctacccctttgctatacagtggggaaactgaggcccagagaggagcagcacacaccttcaattgctgggcagctccagagcccttaaggagccattttctttgtcatttagggaccctcagctcctctgccatgcagaagtagctgcagttctggtacaaacctgcatttcctgccaagaaagccaactcaggtgggcggtaccaggaggctaaggctgagtcagggagcagtcaagcagtcatatttataacaaggccaccacaggaatcccactgctccaggccggaagggatcctgggggcaactcctcccacccccagcccgcctccctgtgcttgagtcctctaatgtgatttcaacctcccccgccatcccccaatagcctaaccctactctgtcaggttgagacttggactagtgggttcaaattctggcggggtgccctcctctgtagaacgaggagaaggtggcgtccttgcagagtgatcgtgaggaccaagtgagtcctgtgtgctgtgaagagtaagaagtacagtgctccacgccgggtccgtgatggttgctccacagtcagcccctcctttgggggcgtgcaggcagttgtctgtctctcctgctagcatgaagaggcaggggcagggtgtgcatggttcatgtctgcgtccgcagcatctagcacacaacaggtgctctctggcttgcactctgtggctcataacctttgttttctcctttgtgtgagcttgtgtgtgtgaaagagatgtcccgttgtgcgccatatttcctgaggacaacctggcacacggtgcccacatgactgctgaatgctggaaaccttacccagctcccactgtgcagacagcagtgcccacctccgctcctcggtgcctcccacctccccacccagaataacgcggcggtccctgtgcttgtcccgcagacgccagcatgtctccggacgccaccaagccgagccactggtgcagcgtggcgtactgggagcaccggacgcgcgtgggccgcctctatgcggtgtacgaccaggccgtcagcatcttctacgacctacctcagggcagcggcttctgcctgggccagctcaacctggagcagcgcagcgagtcggtgcggcgaacgcgcagcaagatcggcttcggcatcctgctcagcaaggagcccgacggcgtgtgggcctacaaccgcggcgagcaccccatcttcgtcaactccccgacgctggacgcgcccggcggccgcgccctggtcgtgcgcaaggtgccccccggctactccatcaaggtgttcgacttcgagcgctcgggcctgcagcacgcgcccgagcccgacgccgccgacggcccctacgaccccaacagcgtccgcatcagcttcgccaagggctgggggccctgctactcccggcagttcatcacctcctgcccctgctggctggagatcctcctcaacaaccccagatagtggcggccccggcgggaggggcgggtgggaggccgcggccaccgccacctgccggcctcgagaggggccgatgcccagagacacagcccccacggacaaaaccccccagatatcatctacctagatttaatataaagttttatatattatatggaaatatatattatacttgtaattatggagtcatttttacaatgtaattatttatgtatggtgcaatgtgtgtatatggacaaaacaagaaagacgcactttggcttataattctttcaatacagatatattttctttctcttcctccttcctcttccttactttttatatatatatataaagaaaatgatacagcagagctaggtggaaaagcctgggtttggtgtatggtttttgagatattaatgcccagacaaaaagctaataccagtcactcgataataaagtattcgcattatagttttttttaaactgtcttctttttacaaagaggggcaggtagggcttcagcggatttctgacccatcatgtaccttgaaacttgacctcagttttcaagttttacttttattggataaagacagaacaaattgaaaagggaggaaagtcacatttactcttaagtaaaccagagaaagttctgttgttccttcctgcccatggctatggggtgtccagtggatagggatggcggtggggaaaagaatacactggccatttatcctggacaagctcttccagtctgatggaggaggttcatgccctagcctagaaaggcccaggtccatgccccccatctttgagttatgagcaagctaaaagaagacactatttctcaccattttgtggaaatggcctggggaacaaagactgaaatgggccttgagcccacctgctaccttgcagagaaccatctcgagccccgtagatctttttaggacctccacaggctatttcccaccccccagccaaaaatagctcagaatctgcccatccagggctgtattaatgatttatgtaaaggcagatggtttatttctactttgtgaaagggaaaagttgaggttctggaaggttaaatgatttgctcatgagacaaaatcaaggttagaagttacatggaattgtaggaccagagccatatcattagatcagctttctgaagaatattctcaaaaaaagaaagtctccttggccagataactaagaggaatgtttcattgtatatcttttttcttggagatttatattaacatattaagtgctctgagaagtcctgtgtattatctcttgctgcataataaattatccccaaacttagcagcttaaaataactaacatttattatctcccacagtttctgcaggtcaggaatctgggagcagcttagccaagtggttctggctcggggtctctggtgaggttgccatcaagctgtcggccagggctgcagtcatctgagtcttgactgggtctgggggacctgctccaagctcgctcatgtagctgctggcaggagccctcagttccctgccatgtgggcatctccactggactacttataacatggcttccccagaacaaatgatccaaaagagcaagggtgaagttgctggggtttttttctttctttctttctttcttttttttttttgagacggggtcttactgtgtcacccaggctggaatgcagtggccccatcatgactcactgcagcctcaaactccctgggctcaggtgatcctcctgcatcagcccctgagtagctgggactacaggtgcacaccatcatgtctggctaagttttgtatttttggtagagatgggatttcaccatgttgcctaggctggtcttgaaatcctgagctcaaatgatcctcccacttcggccccacaaagtgttgtgattatagacatg

SEQ ID NO: 31 - DNA, 32059 bp, Homo sapiens
aagaccagcggggctttgcaaggaaacggggggatgtaactcgtggatacatttttccacccatcaaacatcttgttatactttgtaaacattttctttttttaaaccccagttccagccggacgcccccagacctctgaggttcgaggaggtggtggttttcatttggggctttgcatatttggttgttaggttttgcgagagccttcttattttgccagacgtctcatgcggggtgaagtccactcggccccctcccctgagtcttcgtgtgcgcggaattcgaggagatccggttactaaggatatagaggaaaaaaataaatcgcttgcttttttttttttaattgcctgcttctccccacccccaaattaagttgcttagcaagggggaaagaggctttttccttcttccaacagcccagccgaacgcctttcgttttttgcccccgcggaccttccatgtaggaagccgaggctggcgagcccgacattcgggagccactgcgggggggcctctttttggggaggcgccgacgggggcaggctcggccgtccccagggaagcggcggccgggttcctccggggcgcgccggggccggagagccgcgcagggcgcgggccgcgcggggtggggcagccggagcgcaggcccccgatccccggcgggcgcccccgggcccccgcgcgcgccccggcctccgggagactggcgcatgccacggagcgcccctcgggccgccgccgctcctgcccgggcccctgctgctgctgctgtcgcctgcgcctgctgccccaactcggcgcccgacttcttcatggtgtgcggaggtcatgttcgctccttagcaggcaaacgacttttctcctcgcctcctcgccccgcatgttcaggaccaaacgatctgcgctcgtccggcgtctctggaggagccgtgcgcccggcggcgaggacgaggaggagggcgcagggggaggtggaggaggaggcgagctgcggggagaaggggcgacggacagccgagcgcatggggccggtggcggcggcccgggcagggctggatgctgcctgggcaaggcggtgcgaggtgccaaaggtcaccaccatccccacccgccagccgcgggcgccggcgcggccgggggcgccgaggcggatctgaaggcgctcacgcactcggtgctcaagaaactgaaggagcggcagctggagctgctgctccaggccgtggagtcccgcggcgggacgcgcaccgcgtgcctcctgctgcccggccgcctggactgcaggctgggcccgggggcgcccgccggcgcgcagcctgcgcagccgccctcgtcctactcgctccccctcctgctgtgcaaagtgttcaggtggccggatctcaggcattcctcggaagtcaagaggctgtgttgctgtgaatcttacgggaagatcaaccccgagctggtgtgctgcaacccccatcaccttagccgactctgcgaactaggtgagaagttgtccccctacccccaacattttccggagcgccagtgctggaagaaaagcccctagggcagtgcgtttgtgcagccatccctccagggggagtgtgcataccctcctgggagagtgtgcataccctcctgggagagtgtgcataccctcctgggaagagactgggggctgaaagtagagaagggacaaggggaaactcaaagggcattccctgggggttcccttccaggttttctcctgtgttgccccgaaggggtctacgggcactgctcctgcagtctgcggttaaaaattagacgccttcatttccggatcaacaagggggtgcagagggaggtgggggggtcacgcctccccgcacccggaaagacgttgaggtgtgtggccgagttggatttggtccaggcccgccaaggaaggctgggagaggcgtgctataaaggctggaaggtctccgtatttactcctttagtaaatacggagaatcacgtcgaacaccagtggcccagatactgtcgtggccgcgcacctttggagttttggggcaaagagagttggatggaaggccgaactgggtatctgtctcctttcaactctgccagccccagggtgcagaggaacaaacaggcaggagaagttgggtgtcccctactttttccttccttccgcacagataagtctgtagattagtggggccccggcgcctcagtgacgttgtcgcctcttactgcgctggggcctgggcttctcggctgagaccctgaaactcctttccttttatcctctcagctttctccattccttcctttactctacgtctctgtacacagagtgtgatgtgagggttcaccccgggcgcccgcagatcccccacgttccccagcacgcttgggatgcatctcccgagtgcgctaggaatgggcagccccgtgtcccccgcgcgagtgccgagcggaccggcgggggcagaggtgaattgcacgcctggggggcgggccggggcggggagccgaggttgctgggagctgggtctggagtccgaggacggggagggggcatggtcgccccccgccctgtgaactgtgaagtgcgcggctccggccgagccggtggtttccagccgggccagccgagcgcggcggctgcggccgcagacgtggaggagcggagcgccgaggctggcgccaggcggcctcttttgtttatctgacagctaaatatcaaggcaatcaccgcctcgcggccctgcctccaacccccacagctaagacaaacagttgggctaaaagaatgcctctgttatcataagtttctatctctcttctcatggctgggcctttattttctcttgcttttttaatttcagagtctcccccccctccttactccagatacccgatggattttctcaaaccaactggtgagtagatgatttttaaaatatcctgcttatcttaagttagaaatagagcctctagaacgtggctttttgtgtgtaggcaaaggcttggggaggtgctgggcttcacgttggttctaggtttcctctgttggaagtttggtgaatttttctgttgtggctgggttttttgctgtttttgcaaagacgttcccttgatatgctttacattttgttcctttttcatgtatttgtgctgtgtagccggtgggctcagctttaacacgtggaagctttagtccagagagaagtgtcttgggaaccaaataggactggttgatggggataactcggagacttagtgagtgccaggagcatcagtgggaataatggaaagggtgattcgatagatgggaagacggtttaaaaaggtgcaaagaagactttggtctggagtagacactagaacttttcagaagtataggcaacagccagtaaaaggggggggggggtaggttcctcctgctccagtcacctgcaagtcagtcctctcccggggttttctcagtattcgccatagggactatcaaagtttgaagcatagctctgcctgtctgctgctttgtcactggctggcatgaagccatggcagaagcccatttgagactggcaccagccctgttgtggttgtctgcattcaacttctggccggcagcagcacaggggtccatcctctggacatcacagtgctggggacagggtcagcaaaatgaacttgggggtgacaacaaggacaaacccaaattcctggagctccctcttacagtaggagatagatctgtttgctaaaagtacaggttgtatgtaaccttggtttttgtgcctgtatactggtgcctgaaaaaaacattaatacttgggacatttttattttgccaaggttctgggagaaggaaaagtgaagggttgggcaccatttagctcctggaattctgcaagtccttccgcctcctgcgttttggctgttgggcctttccccccactaattaaaagttttgctggggcgttgtcataaattaaatactttaatgaacgtgtaaccgaagcccatactctgcagccagtcctcctgggactctaccagctccctcaagttgggaaggcgttcctgcttgcctggtgccggtctaataagtggcccgcaaagcatgtgatattttgctttcgatttacaaaacaccagataaatggttattaataaggagatacccagctctctgtatttgtaacaaacgttaactggaattaccaagctctgttttcctaaagactgtaacttgactgggttttggcttaaagaatcaagaattcttttatgaagttcattttccaaggggccacctctgacctgttttttttgtccttccatattcttcaaatttggaggttttccttaaaagagagagaacagtgaccttagccccagggataaagaccagcaggggtaaatgttcccagaaacctccaaaaaccatagaaaagaaaggccatgttcccttgggtttcctgcagagacactgggataaatctgttctcaggatttaagcagtcattctgccaggccagggcctcattttcggtgagtggagtgatatatttattcattagcaagtgttgacattaggtagcaaaatgtgtgtaaacagagaagccacaaagacaggaatgtgccatttccaagggggagaaaagttctccagatcagccaataggaagtgattaacctgccaatcggaaactaagacagctggttactcacccaaaacgttttgttgaaaatagaacaaaaaaagaaatgagaaaaggcgctgctgtgtaagaatttagcatcagtaatagacaaagcccccacgaagggaattgtcctgccacattggaggacagccaggtctggagctggagcacaccccccccgcccccctcacaggtctggggctggttttgccagctgctgtggccgggggcattgaggtcagaccacagatgggcgctgacccaggtcttcatccccattttgcgtatgggagaatgtttggcccgggaatctacatggaccatttacattcttcagtttctatgtcccttaggttgaatttttggtcttgggttactagatgaaacaggcacaaagttttacagtggacaactgttaaaatcttaaccagttgcacaactaaaggaatacatcctgtgaagtctccatcttaggaaaaggtggtgggaatggggctggggcctggtaccctgcagcctttggagacacagagggctcaaagctaggaactccattttgctataatttaagccactccactcagcatctgggaggcctggactttagacacctaggtactgtgtggtccaaccaggagagccttctttgaaagagtgttcacatgactgaacctaggggaggccagttgtgacttgtggctgtcagaagtcagaaagacacccccacctccacatcccacaagaagtcagaatttgctgtttaaagctggatctcggggatagctgtgtgggctctgcttcccgtgtttcattgtatctgatggtctgaaaggtttgaggaatggctggccttggggggttgctgggtgagctcttgagggacccaggtggccagtatccatgggcagatccagcctgcaaatccagatcggaagtctggtgtcttgacctgagatctggcactgcgtttctctcttaaccgaggtccctcttaacttttctaggcctcttttaaaatcagcatgatgaaagagattaggtcattcattcatttattcattcattggttcagtcattcattttacaggcatgatgatgtgcctacctagaaatttgaggattccgatgcagtgctgtgttctttttttttccgagacagtctcattctgtgcccaggctggagtgcagtggcccgatctcggctcactgcaagctccacctcctgggttcacaccattgtcctgcctcagcctcccgagcagctgggactacaggtgcccgtcaccatgcccagctaattttttgtatttttagtagagacggggtttcaccgagttagccaggatggtctcgatctcctgacctcgtgtgatctgcccacctctgcttcccaaagtgctgggattacaggcgtgagccactgcacctggcagtgctgtgttcttttataaccagggttcatttgagttctgggttggttgaactacctggggcagagctgggacccttggggtacagtggtgagtaggggctcctctgtctttaacagtacttaggaagctcagaacgcagttgctgagactatcgtgggactcccagctcctttaccttgtactcattctcaatagttcgctccttggctgctccccagggttgggttttcaaagactctgttggagctgctcggagaaaggaatgagtctttttctctcgcagaacctagtgcttaccaagtgcttgataacacttagtgttgcgtgagtcaggagtggcctagagcttctgtctgccagccagcctgggctctggggaacaggcgacacaggcctaaggtgagaccctgacttcagagatctgtctatgcggagcttttctgtgggtgagagatggaggtatggctcctttaaccttgaggccagtctggatggcctggccacctccaggaaagagggtagggactccatagcctgcctggggagtgagagccatgggatagggctggactcttgggaatagcccagctcactgggtggccctttgagctagtcagtgacgcctcagtttacctggctgcctatggaacaggtatactttgcttcttcacaggggtggtagggaggcttaattaacgtttgtaaatccctcttgagatcaaagccactgcagaagggcagagcaccatttcacaaaaatgcttgtggttgcctgtgtggagctggcttacctttgatctgagatgggctgacaccctgaatgtggtctcagctctgctctgagatgcccggcttttcctttgaaacacaccttgcccctgggattctgccagccaaaggtggcggggagtggctgtggataagtcattatgtttaatgtgggggtgtcttccatctgggaggagtgggtggaggagagggttgagaagcctatctctagaaaatgatgaaggccatcaaaatggtttagaaagtgcagggtatacaccatttaacaagtaactccatttcctgcctgcctctattgttttctgtttgattaagtgtatcctgtaaaactgtatattcctgttaggaattagactttaccctgataaaatgagattacacacacagtcttctttccccctacccaccgcagccacctcacccccacgcctgcctccacttctgcccctcgcccgcttaggagagttcttgaaaagttgtccttccagccttgagaatgtgggagagggagtgaccctgagttagagagagaaacttagcattaagagggcagacagcagaaacccagagatggtttggggctatgtgtaggccactaaaggattcccatgggctacttgcccgtctgctctttttttttggctttcctatttgccagcatggccaagtggttccaactggaaacccacagggacattgtcctggtggcctggggtaggaggcctggtgtctgcacgatccaacctgttgtgtttgctgcggacctgggcagcacctttccttagccgggctctccgctaggacttcagggagtttggcgctgccagtggtgcatgacaagcttacagggtcttgtgtatttgtgtttcatgggactaatgagttgtggttcatggacattaggttttgctttaattgcttggagggcggttgtggagactgtttctcagctggaattgtcattatcctcattaacggtgaggtcactgtgcagagtacctgagggtgacagaagttgaagagaagtctagttaagggcagatgcaatctaaaggtaaaaatcagtgaggaaactccgagtgttgggtgccaaatgttttataggaactgagggcagagagccttagcaggtctggggttgcctgggaaggtttccagagatgaggggtttggactagcctgggagaggtagaacatttcccctccggctcggagccttgctgagaatgttctctgtcttgatctggtggtggttacacagatgtatacatgagtaacattcattgcgtctacttgggattttgtatactttgctctacttaagttagtcctcaattaaaaaaggggaaagaagtcccggcagcccaacatcaatcttgagaatgttttcaagaactgggaaacctgtctttaaaaggatgaaggcagagaggacatgggctccaaggagagagccttctgcccttgatgagggatgacagagcaaccagggttgagaaagtccaacccaaacctcctttgaccttgggaaccacctggtatccgtaatgggggactggtaatgcaagagaaattccagccagtctcattgagcctgactcgagtaatgattaactggctgcccggagcccagacgggtgacaaggtgctgtggtctgtcttacgatgggcagtgaagcctgagcagaccattaataatcagcatcaaggccgcgagtcagccttttggaatgtgtggtttgtctttcatgctgtttagagcgtgcttaaagatggatcttggtgtttttatttgtgtatttatttctttctctccccttttcaaatccacagcagactgtccagatgctgtgccttcctccgctgaaacagggggaacgaattatctggcccctggggggctttcaggtaagatgctttctcttattttcctggcaattccaaccttttttgaaattgctaaagactggaggaatgggggtggccttctgccaccccagctggtctggacttcattctcatttttatatgccttaagttggatgcatcggtggtgacattgtggtgcccttcagctcctcatcctgcagtcctttacgctctggacactggatccgttccgtggacggggagacaagagcgagctggggattgctttggtgtgtgaagtgttgcccggttatttttaagcagctcctggcttggggggcttcagcttggtgactttggtgtcattaactcatgcatttgagctctttttttgcttttgctctttgcgcatgggggatgtaaagggaatggacccacctttagggaacttgttgaagacagatcccaagcatacgatgggatttcagagtagatctgaggcttccctcccaagttctgattcccagcccagcctgctgcaggattttgcagcacatgtctggggctgggagcaccagggtgggagcactgccaacagtaggagctgtaattgttccctagcggggcaggttttcctcagggctcacaggtatgcgtgaaggcctggaatgccagtgctggggggtcacggggctggctgacaggcacggggtagccagagcattgttgttcctgaggatgcgaaaagagggcagtacttagagaaactcactggttatgtacatgggacgcatttcatgttgttctgaagaaatcctatttctacctgtttttccatccccaccatgtcatcactagattttctaagaactggctgaagcaagagggaaaacgaccttaaaaacagaaattccagcagagttttgggcatttggcatttccttgcctgtaggatcacgtggtagcagctcgaatagaagctgtgccctgttgtggtgtatcctcttgtgtgaggggcacccttttttgtggggtacctgctctgactacttggtggtgtgtcttccatggctggctcaggcaaagttcattcccggacggctccctccccggctctcctcttcaggaactgagcttgctgagaacgtctttagggagacccttgtttgttttcatttcaatgcaatatatactctgttatctgagactgagggtattgtttactcaaagcttctaatgagaattgagcaggaaaaagagggacctagagaagggagggggcttcaggcagtacggtgggagtggacagaggagttgaggagggagaaaaggcagcagtgtgtgaactgcatcttttctgctttctaaggctgagagagttcttgaaagaaagaaggccaatgagaggaaagggtctcagcagaataacacgctcaggatgttgttagatggttttattttttaaaccctgaatgtgcagggaggagccccggcccctccaaaccacatgaaataagcaagggaagtggcagcttttgaaagggtcctttcggaaggtttgtcttcttgataacatcttgtctgtctcccctgccggaggaaatgacgacaccaggctgagataccagcctgagtgcctcctcacccgcccgtgccatgtgacctgtgaagccctcaggagatgggtgggcttttttttttttttcttttttgacaaagtctcgctctgtcgcccaggctggagtgcagtggcgcgatttcggctcacacagacggagtctcgctctgtcaccaggctggagtgcagtggcccgatttcggctcactgcaacctccacctcccaggttcaagcaattctcctgcctcagcctcccaagtagctgggattacaggcatccaccactgtgcccagctaattttttgtatttttagtagagatggggtttcgccatgttggccaggctggtcttgaactcctgacctcggatgatccacccaccctttcctccccaagtgctgagattacaggtgtgagccactgcgcctggccgatgggtgggctttttttccccaaagctcttccagtcctagaaagaaactgggggtaaaacaatcattaactccttcccctcacccctccaggtaattgtagacacagatattaataaggagctgccaggaagaagcagtgactctctgaagggcagtgtggcttcagaagactgcagagagaagagggggccttccacatggcaagagcatttgttttgaatttcagctcttgatttactaattccaaaggcttcaaagtttgagctccttcttctttccgttcagagttggtgcagtgtattcataatgggccatggtggggagggtacactgttttgggggttgatgtcaccggcttgggggcgtctggaggggaggtgatgggcacggagaaaacctagggctgtcctctttgtagcgagaatgccttccaaaagggaactttattggcccctgtccagggcagagagttttgtaaatggagaaagcccaaacctcctccttttcaagaagttgatcgttccatggggggtggcctgggtgtgtctgccttgctgtggatgaggccagtgactggatgtggcagggctggatgggggaaggggcatagcagacactgaggttggggggtgggagcctggcagcaaggtggggagcagtgaaaactgaggagtttctccctcctcctccttgaaataacctctctgagcctctttcacaggccctgtgtgctgttttccttcctgtcctgccctggctgagagcgggcttaatgaatggggctcagtttagggtgggaggaaggtcggcagcaggagccagggcttgattctcttggcaagggaagaagggaaagaaaaaacagccgaatgtgaaaatgtggtgcctcggaggtgggggtggggtgtgctcaaaggccggtcctctcctgaaatgcaggggtgactccaaggctggcccttccctttcctgcgcccttgcaaactgcccgggaggaaggggagtgggcgggtaggagcccgggggcggggctgctggctgcaggttggaattccagcattgcagctttgttttgggggggtgtgggggggtgggtagacgacaggcctggtcgttagggacttgcagtgaaacacaccccacccttgcaagtttcctcggtctgggaaaatgggacatttttagaaggcagtgacttgcttccaggagattgtactttcatttttgacagctggctctctgagacagatggattgctgggtgcaagcttgtgtgtgtatgcgtgtgtgtgtgttgtgggggtgggtgtgtgggtgggtgggttttgccgcagacgtacagatagacaatcccgtgcgcaaacacatgagagcgtgcggatgcccacaggcaggctctgggatagggtgggtccctgtcgctggggtgggttgatgtcagggcggcctctccaagaggttgtggacttgtggggtggagtttgtggattgattctgctttgtgatttggcagtctgtgcctgactctctgggatgggtgtcttttgaaaggcatgcaactccagaacaggtccttgctgctgcttggacatggatgtgtcatggctcaggaagatcacctgggagaggtctgatgtagctgggaagcctctaggctcagctccgtcgtggagatggaaaggatttgctcccagagctttccggggatcactgggaatgcagagcatgtgttggaagctatcatctttgcagcctccatctggagtttctgtctgggggctttcattttgcctgtctgctgtcctggtttgagtgggttgagggagcagcatctcccttgtgagttgtaggttattcagctgcagactcatcttctagcctcctcctttatatatgaatgtctggagctggctgggcctcagccatatggacctgcccagttagggtagggattggaagccagcaaccacttgtagttatttaaacttcaaaagaagtgctcccatggatctcaaggagggaggtaggaggcagtggagacagaagtgctcacgtgtcctgggaaactccatctcttggctgtgcgaagtcatgcttgttggagagacccggcaccatgcctccaacccaagggtggccaactctttgcttgagattcatatgtggctactagtccccaagtctgggggatgggagcgtccttgagtcagtatccattcagcatccaaggatgtttctgtctccttctctttgatccttgctggcatctgtcatagtctcagaggagagccttcaaaaatacctatataatctgaaaatgcacccctggctcagtccacagttgacttgggctcaaaccaagtagcttaggaaacattgctccatcctgttttaaggaaagttaatcagctgcacgtgaacaattattcattgtctggcttggaattgtgatcatgaactgggaacctgggcctgggcgcctgttgctctgcttttaaattaagtcacctccccctgcctggctacaaaacagctcatggtttcactgaggtctctaatgccattgtggagtgagggcagggggcacaggttgagctcacaggcatgtgggcctttcatccaaatgctcatgagcgtggactttgggggactcaggtggacaggtgcttgtgaccatgagcaagctccttccttcccatccccttagtaccctgcaggccactgtgagaaatgacggcctagaactcaggggacaccttctgcctctccttaaacacctgccaacaggatgagtcagggctggggcgggctcacctggtgcacacccacaccctggtgaagaccagtcctggaccccgcctcttctgcagtgccccaggtcatgcacttccccctggagaagggcttactgataaaaccccttttgtcctggaaagaatgaggcagtccggcaggggttaaatacagggtgacagcatttaaaatctctggagcaaatttgggctgctctgccggccagacaagatggtctgctgccgcctcacgcatcctgtccccaggctgaactgggccagcaaagggagagggccaggtgaaggccaggctttgggtggtgtcacttttggtgacactgtagcatgctgattgcccctcacttcctacacacacacacacacacacacacacacacacacacacacacatgcctttacttagcaaagcctgactgtagctgcgtagacttgtacacctatgggacctccgtggcaagctcagagccggtggagcagtgaaaagggaggaaatgccgaagaattcatgatcaagtttggcttcctttgcttctttttaaaattttttaatgttttaattttttttttttttaattcgagatggagttttgctctgtcgcccaggctggagtgcaatggcaggatctcgagtcactgcaacctctgcctcctggattcaagggactctcctgcctcagcctctgagtagttggattgcaggcgtgcaccaccacgcccggctaatttgtgtacttttttgtagagagagggttttgccatgttggtcaggctggtcttgaactcctgacctcaggtgatccgcccgccttggcctcccaaagtgctgggattccaggcatgagccactgcgcccggcctctttgctcctttattattgttgttactgtgtcataattccttgcagaattatgatggccaggctggtctttacttccttcggtccaggccttgaactcggagcagcactctcaaagcagttgtcttcacctggcagaagaaaaaaaaggtgtaaagtgctggttcctggacttgctcgcacactaaaatccctcgggattcagcttcccagataactttcttgcttctttgtagagacatttgagagaaaactattattaactatacatggtccactgttttgctttgctgtcatgaatgggattgtaaaagggacccatgggaccgggtttccttttgggacgatgaaaatgttctggaactgtagagtggtgatggttgcacagttcaccgaatgtattcaatgccattggtggcacattttaagttatgtgtattttaccacaagtttgaccaaaaaatggccagcggtaggttttaaatacatgtagatacttggataatctataaggaacagtgattgtggagagtaaaattggagagacttctgttagttgcctaggacctgatgatggtagacacttgttttggtggcagccctgaggtcacatgggaagtacattgatggaccagggagcaaggctggtagcctgcctgggatctcgtgtgtgtgtgtgtggtgtgtgtgtgtgtgtgtgtgtgtgtgtgtgtgtgtgtgttttgagatggagtctcactctgtcaccctggctggagggcagtggcgtgatctcggctcactacaacctccacctcctgggttcaagccattctcatgcgtcagtatccctagcagctgggattacaggcgtgccacaccatgcctggctaatttttttctagtagaaagggcgtttcaccatgttggccagactggtctcgaactcctaacctcaagtgatcctcccgacttagcctcccaaagtgctgggattataggcgtgtaccaccacgcctggccttctgctgtgtgttacctgagcaagcagacacatctgtgctgatccttcgaccttccttttttcttcgtgggttccagaaatgagagacaggaaagttccctctggtttgattcccggcctgacttttctgctgggggaagtgaatatgcttgttctcactctgcggggtccccctggcctgcccatcccagtgactgcgaaccaggatggtgccagggttggctccaaaagctggtgatccagacccttcctgggcccctggagaccccagtccctgtgatgtccttgcccaagttctagggctgcagtggccgtaggtgactggcccgggcaccctccctttgcgggagcctcgtgaaaggatactgtaagcacagccacagggaggtcaccactggccctaccacctctcgctcggtattgaatggctagccccaagcctggctgcctgcctactgtcacacagaggcttcctctccgggctattttcagcgggaagatattattaactgctgaggcacagttctcaatttagtggttaacacaccaagaaagcaacactcacctgatcccggccactctacctaaacctgttggctcacttgggggactcggctgccccccagcctctctgtttctctctgtgggttcacctgggagatgtgggcttccactcccgtggaaggtgccccgtggattcagtatctgctagagagagaaccaggcttcttacgaagccaactcttaaaaggtgtagaaaatgatcgtatttatactctaagatggggacattttttgataggggtgggcactggctgggaaaagggactttcagcggtgttgaggacagttatttaaaacagggtgataactttcaccttgtaagttaacaggaaatattgggacaagacaggaaattgcatcatctttttttttgagaataactccagagaaaagtggttcgtgaaaggtagtggctgagaaacggctagcctgttttctgttttgtgttttttttttcttcccttccactcccacgagaacatgtaggccattttctttaagaaagaggctgtttgagaactttatgttatttttattatttaaaaaaatattttaccagaagggtcaccttcagttgaaatgttaactgccgccttatttcccattttactaaagaatctttcatgactttttcagcttccttccccaaatggtaaggccaagcagctcttggctggaagctaattttggtttggctggggagtcctcaacactgagccccacccagtgtcattagctcagttttaacttgcaaaaaaaagattgtatttttttttttgatggggggtacgtaagaatttactcacgcctttagcctttttacccacccccggtactgccttcccctaacagaggcacctggcacttagccgccgggaactcagggctgccttcgtgttttcaagccaccgtgtccccctcatcctgcaggagttctgtaactttcctgagactatttctagggtgctagtgaggagtggaggggaaatgggtctcggagctgccctggtacagctgtgtccagtaacggtgctgtgctttggaggaaggagtgatatggttcacctagaagcatctcccagagagggggcttatcacagccctacagtggtgcagataaggtccagttccattttttgtctctgggtttctaaatcccctctttgttgatgtcattgttctaatgacacagggcatgggacagtgccccggcccgtgctgccaaggagccgtctttaggacagagaccagaaagaaagagacctgtgtgtgtggctggcccgctctccactcacgctcacccccaccctcccagctttttccttagcgtgctttgttttgttttcataacacaacaagggccctggggtgtgtaaaagcattgttgaacacttggtgagggcaacttgtccaaacagagcaggacgccaaagcagaatgctgtgggcaggtggtgtgcccacagaggttggtgggccggcgccggccttggaaacacctctcagtggcatatgccgcggcggctgagtgtgacctagcgcagaacagggcttccctcttgtgtcctccgtggggagtccaggagagggacttggtccttctggctgactccgtgcttggaaggtgtgctcccctctcaggtgggttcacatgtgcctccctctgccgggtgtgaagctaggtgggcccgctgctttggaagaagccagtgtgtccctgtggtttgtttatggagcaaatatgtattgacacctattatgtgccaggctgtgtgctgtgcagaggaccagttcctgggctgggttagaattaagaattggcagttggaatggcttgtccgaaggtgatgttgaatccatggggatggagccggcgggaggggggattgactaggagttgcctctacctggaggcaggcaggggcagcttctgtaggacagaggagcctggtccctccatgaagccaggccataggtgggggaggtgcagggtgggccccctgggatgggcctagctcttgagtcatccacttctacttctgctttggttgtgtggtctgttgagaattgagataaagcaaagcttgtggataaacagaggtaggtctcccgggttttggttccagcccgcctccccaccccgcttcttgctgattgtaagatgacagcaggaagaacaggagctgtggttataatccaccctccagaccctggtagtacctggggcacagcacagagtggaagtgaccagcctagcgccaggctcctcagtggaccacggccaaggggtggggaaacatctggaaagacagtatctaatgtcttgacagccagaggagaagtgggatgttttcaaagcccaggagtgactttccctttgtaactccagaggacttgattcgcaacgaagaccatctgggggatgaaggaaattcttgctttttaattttaaatctgagggttaagcccgtttctgaggtgtcagccctgtgtgtgaggccctggcctgtctggggttgggtttggatgaaataatctaagatgcagttaccagggtgtttccttttcacattcatccttctctgtctgttcccccggggccaaccgatggcttccaagctctgtggagttcactaattgaattactcttctcgctcctccgtgaagccccaccaggaagaaaaggcggggagagctgcttttgctggggggtttgatcagagcagaaagggaagatctggtctcaattccaatttcatcttgcaaagtcgggactttctttcagccagaagacaactcagataaccaggccagcgactgtgtgctcatttcagtattgctttcttacgttttgatctgcgactgtcactcaacaggaacaaaaacaataagacgccaagatatgactgtgccgttggcagattagctgtctgcattttctggggtggctcactcggaggttaaatgattgtccctgtcccctgtcccaccttccagtcacctcatgaagctgttaagtgtctccttcccctgcaggctaagtgaggatcatcaagagctgggcctggggaccttgtcagcctcactgcagcctctgagccagccctgccccaccccctcatgaatcagtaaccaagagggaaaattaaaaagttagttatcagtgtgatctgagtgcaccataccgttcttacaaatagatgggccccatctcctgctcagtgggggcacaatcaaaaccctgctgggggggctgttttctggggaagagcccaggatcgtggggcctgcaaaaactcagaagcccccccaccttccccccagggtgtccaggatgccctagtcccaggagggggctgggagagaattacaatgtcggggccagcatcctccactttcctgtcactagaggctggcctgctctcctgggttgaggccgagtgtctcagcccctggctggccacatggccttgcaggagccatttctgtgttctgggcctcagttttctcatctgcaaaataagggcttgggcttggctgccaagtcccttcggtgatctgtgatctttgtctcttggatttgaggggtgtgggaatgatccccctattgatgagatatccctatggaagccaaagactgcttccattttaaaataaaaaggttgtagttctttctgtctcttggctcgcaaactcttccaagtatgggtgaaagctgaggactctgttcagaaaaatgcatgctataccacaatttgtatacatctgcagggggccgatatctttgctgaagcccagtcccacccgtggaatccccagttcaggaaatctatgcttatgaggactagttatgggggtgcaaaggagagccttaagagagctgaggcctttttcttttattgtggtaaaatatacataaaatataccatattaacaatttttaagtgtatagttctgtggcattaagtacattcatattgtgctattatccccaccgtccacatccagaactttttcatcttccctagctgaaactttgttcccatgaaacactaacttcccttctcccctcccccagcacttggcacccaccattctttctgtctatgaatttgcctcctcctctaggtacttcatagaatagtggaatcagacagtgtttgtccttttgtgatcggcttatttcacttaacataatgccctcagggttcatccatactctagcgtatgtcagaatttccttcttttttaaggctgaataatattttattgtatgaatattccatgtctggttgatttattgcttgatggacacttggcttgcttctaccttttggctattgtgaataatgctgctgtgaacatggatgtgcaaataccactggagtcgccgctttcagttcttctgggtatatacccagaggtggaattgctaaattacactgtcattctgtgtttaattttttaaggcatcgccaacggtagggcctccttgacttgtgcctcatgtgtcggcacacaccgatcgcatgcggtgggggagccctacccaccggggtgggcttgagggcgaatcctggggcagagggagtgagaaagcggggaggggacagtctgtccctgcgcggtgggggaggggcagtgctgggctgctgcagtcaccagccagattggagctcacatttatgggagcccatgtttatgggaggcctggaggctctgaaaggtggggcacccagcacagagcagctggccgtgtatgttggactccagggccttgtgacagcagcttctgggtgggggaccctttcattcttcttttattcccttgacctcctaactggaggttaggagtgggaggacccgccagagggagtgggggcttgggtctgggaggtcctgggtgctttaggggtgaaagggctgggatggctgaacagtgagtgtgtccaagcgggagagattagattacggaggcagacagaagtaatgattaacttttccagtctgcacgctgtctccaggctgtcgtactgttgtttttccctctaagtacagtgcggccctggcctggccaggccctggtattgggttgtaaagtgagagatggaatgagggctgggagtgcacggggaggggggccagggagggagctcgcaggagaagaaggagcttttccatcggatcctgcattggaatttattggccggaatgcagtaaatgttcaaaatgccatcccatccaacagttttcataattgttatggaacaaggggagccgggggaggggaggaatgaaaaggacttttgtttctcactgtatttttccatgtcttcggacagttttcctaccctctagaaactggagtggagttggatctgtgggggatagggtgggagaagggtctgcctttgggtcctgtgatgccttccaaggactaggggtcctggtagcctggggctttattaaaacgaggcccacagcaaaagtagcttggtttcttgcacacacagagcccccccaccacctgcaaaaccagggaaaaactgtcctgtccttctaggggttttgtccttttggaaaattggcttaatgatgcagtggtttgtattaagattttcatgatgctttaacgtgtgtgtgtgtgtgtgtgtgtgtgagtgagagagagagagagagagaaagagagaaagagattgagagagagagagagagaatgaatcagcattcagtgccagctgcccagttgggaatccagatagggaatttggggaatctcctacactctcagggtggcaggtgggtaggtgggtgaggtaagagacttgacttggtagtttctcttggacacgacagactttctgttccatgcttgtcccagcccttgtgtcttcctgggggtgccagggtcatgcccagagggaaggcagctgagcagacaatgccatgcagggctgagggcttctgtgcctgctaatatgtgaaccccctttctgaagagagctgctctgagttacttggggggtaacagtgggaacctggttggtgtaccatggaggggaagtatctggaaatttgaactcgagaaatgattcgactgcatgcacactaaacagcagccagagaggccctttactgtcaatattatgaatggagttggctgggtcgggagtccccacccttcctctgaggcctctctcagaggagcctgggcagagtgggcctcctcagacagcagtggctgcaggcagctgggtacacgctgtaatttgcatggctgaatgctggggcacaggaagccgcgtcagcctgactggcgagacagacaagagcttttgatttgtgtggctttcctcccctgccccgtgccaccctcaattacattctccatggcgagataaatgctcttaggagcattcatccccaggttgggggcttcagactcagatgcttggggggttttgggaggtggtgtgggaccagtttggggagccagggagtacattttagttctaggaattgattatttaacataatttgtaaggacacagtcactaattagtgttctagaccagcaggatctgcgaaatatgtaggcttgggagaggtggcaaggagggcggtgatgggaggagaaacttcagggaaccaagcctgggcagacagtggacggatgacagtgataaaagagatcctctcttgggggctcaccgtctcttgagggtgatgaatagtaagacagagtaaaaagtcatttctgactctgaaattaaagaaaaaaaaaagttggtttagagatggacacagcaaaacctgactcaaacctcctttcccttttgattttattttgttttattgttgcaaattaaatgcaaaaatgtaccctgctcctcaaagtggttttcttactctctggaaggtagtaaaaataaatggaaccagtgttgtttaatactgagaatcagagtccagccagagaccatgaaggcagaagggggcccatggggccatcttcccttgtcccctttacattatttatggacaggtcaaactgagaccctgagagggcaagccacttggccaaggtcacagagcagcttgctggcaaaaaagccgtatcaccccccacttcttgctgcaggggagttgcaccccatgcgcagctctaaaagctggtgcagcatttccaaagtgtgttctgaaggacactttggagaggaacagtgggcttggtggctttagaggcctgtgtccacagctcacaccaggcaatattctgggcttgaattgcagctctgcacttcggccagtgacttgtgcctcacccctactactccctttttttaagataggctggtgatagtatgcagcctcagagggttgtcatgagccacttagagaacacagcctatgcaaagtaaatgcttattaagtgtaggcattggcccagaactgttctaccatggggtgtggggatgtggagacaatcaggaagactggtgggcattttctgagcggctggagaacccaggagcctcagagatgagaccaacgtgtgtgcagcactctccacaagctggccccaatcacttttgcatcaaattggtacagcaaccttatgaggctggccttgggggaaccctgttttagggatgagctgaacttaccgggaggctgcatgcgaggttggtgtgaaatgcatatctggctttgtagctggtcggctcacctctggggttggcacaggggcgggggttctgccatggctagaatgcgctaaggggtggaaacgaagcctgctgggcccgggaaccagagagcagcctggcctttgaaggagaccctgtggcaccccctgcccacccccaagtccagccatctcacttcactggagatgctgcaaagcatgaaaaaaaaaaaatccagtgttctcaggtcagccttccaccagccaggattcatcgtctgatctgtttggggagagagcatggggtggtggagatgggttgggccccagtgttttctgattaactcgcagtttacctgaaacattttggtttgtttcctccatgaggaactcactctaaaccccagcattgtctgtgtttcctgaggagtctgagggagctctggggtcctatttcctcttttggatgaggctgtgagcatggtggattagagacagccccttaaagttagcccagatatctcagcaagttttacgcgtctctatttgggggagggattcgcctattgaaaacaagagaccagcaagggtccttgtgaattatgatggtttggcgtgagaatagatgggatggattggcactggagtccccttttatcttaggcttgtccctgaagagggcttgttgatatcagaacagccaatttcctgacagggttgggagcaggggatgggtgctgttaacctttgagatgtccgttgtggagggagagacaggatgaggcaaccgttggtggcgcctgggtcctgaggagggaggaccctggacctggcgttagcgaggcgtggtgatgtttgcgctcccaggttgccaggtgcaagctgtctgtgtccacatttctgcccttcatttgcccctgattggcacagggagcctgcaggaggcggccgtgcctgcccaggcgcccttcctccccaacttctccgtcctcagccttctgctctgctggaccatggaggagggggctgataggcccgtggccctgttggactttggcagaggaatatcacttcattatccaagtgcctcacagagatgagagccggtggagacccgtcctcactcgcctttgaccccagctcccggtaccctagcaattgggcacatttaaccgtgggtcatcagctgatggagctcatgtctttactggcttttttccccaagcttgcccttgttcctaaatggaatcttgggggaccccctccccacaagtacgttctttgtgtgtctgggcccagtcaggcccagatagcttctcttccacgcgtgcccgtgttctcataaccccatggctgttcttggagctgctctgcctctctgccctctgccttcaggtggagaatggtattgttgaggcactgagcaaggcctttcccccctcctcccatttttcttctttctcatctcctgacgccttcaaattaaaaatttaagaaggggtctgggtgcggcggctcacgcctataatcccagcactttgggaggctgaggctggcggatcacgaggtcaggagatcgagaccatcctggctaacacggtgaaaccctgtctctactaaaaatacaaaaaattagccaggcgtggtggcgggtgcctgtagtcccagctactcgggaggctgaggcaggagaatggcgtgaacccgggaggcggagcttgcagtgagccgagattgtgccactgcactccagcctgggcgacagagcgagactccatctcaaaaaaaaaaaagaaaaacatttaagaaggggaaaattccttgcttaacctaaaatgtggccttgaggcctggtcaccctgtgccattgagacctggggtgtgaggttcattcacgagcctctggtctcctggaagggtctggtctgttcattcatgagcagggtaattaaataactctttgtaagagtcagggagctccttgctaagtggtcttccccagttggagcgcaaacacaggctgaagtcctctcctttctcaacacccacctcccccttccctttaaagggaggattttatgctttaagggaaatggggaaggttgggggggggcaacaccttaaaggaattttaggcagattcagcatttttctggtgttgctccaaaaattccccacactgtaataaaaagatacaactgtgagcaggcatctgattagtgagctttttacaacacagcttttcttttggatgctttaaaatgaacacatactgttttaaaacaagcccctgtacagttttctggggagggggagaagtttgtggaaaataccggaaaaggttataaagctgagggaaattaacaaaggactgtgagttttgccttcagaggttaactatcagcgagaggccaaggctcttccttagtccttgtactgactgaacttcccagcccctcgacacgtggcccgggaagtccctgggagcaaagcgtccacacagacctttgtggggagactcgtgtgggctgtgggcccgattcagggaactgtgtttctgtgaagatgaagctgagcatttcccagaaatgagcccaaatggcggggaattcagggcaaaggggaatctctgtagtggcaatgggggatgtcgtgcggggtccccagaaggtgtgatgtccacacaagggtgtgtgttcgaggggcctttgctgttgccgaatggttttgctggaaagcttgttttttgtgtgtgcttagagatagtcccggcaggaggagactggagctgtcctaacgggaggacagaggctgctggtgggggagctggaggggacagcgagggaggagcaggcaggagtctccctgcggtgggttagggcaccaaatggacttcagggcccttgttcacacacagcagcattcacgacatccatgcattgcagtttttctgggctgggccattaacctcagcagaaaaatgctttttccagggggtgtctggcagcacattgctggcgggctgcacagatgaaacagaaacccacctgacacttccccgtcctgctacagatctcaggctccagtccccacccagcttcctctgcccccagaggcccccacccttggcagacaaggcttccaccccttgcctaggtggctgacaggcctggcatgggggcacctcgatctcaggtccatactccactcactcccttgctcctcctcctcctcctcctgttggccggtgccaggtttcagtgggtcctggctgcatgaaacaaagcattgtgaggctctgctgagggtctcccacccaccctccctcccgcctccttcccagcagctcctcgagtcttcctttccaggccaggtttgttgtcccgaattgggaaaataagcaaaagcttcttgtgtttcagaacaccctcctccacaccaaaagggtggatgtgctgtgcctcccggaagagggctttctcccccgcttcacacttgatgccaatgtgtccttccttccctgggcgttcaggtctttggtgtagccttcagagctgagttccctcagcaagaaagttcaaagattgccagcgctcacaagtttattagcagttgatggatactttgcagaaacaagtgaatgcctgatgagtcaccttctccctgtccctgtcttgttttccatatgttccagtacgtatgtgcacacagaaacacacataacacacactcgtacacactgacatcatggacacagtcttgcacacgcacatgcacaagcactggacttccaagctacatggggggtggtgaccggccagttttctggtgttgatttttagtgggggttgggggttgagggaaaggaatgagacctcagtgtcccctttttgtggagcttttggggcaggcatttgggaaggccagcttggggtgtctgtagggaaccgctgctctgggtgtgtgtgtctgtggctgccccagcaggccgcagtgtgcacatttgtatggccttactgacgggcacctccatccaacactggctgctacttaaaacaacaacaacaacaacaacaactgagtggagccagtgggttcccaggtcctaacacgcctgtaaaagttggagccagttagtgtcctgggctgccccagttacccagcctgctggggcagcaggatgcggccccatcttccgccatggaccccctgcagggtgcaacccatcatcattgactctgaacccagttactccagaaacacaaaggccacaccaaaacacatctcacactcaacccctgctttgtgccccccaggtccccaagaggaggagctggggctgcagggagcgagggcaaggccctgaccgacgtggggcccttcccctctgcttttccccctctgctgtccccatttttgttaacaaatacaagacttccggtctccaccctgctgccacaaaccacagcgttcctgcagtctggctgggctggggagatttatggtcccaagtctgaggcctgcccgctggctcctacttaaggaggagtcagaatgcccgccgccggggctccctttccctccgtgtgaccccccttttaaagtcctccaagtgcctgttgaggaaaattaccttaccagaatcaccccggcccccaggctgcctgtgggaagactgtgtagggaagcggggcggggcctgcaggggagggatgagggcggagcagggcgccctgcaggctccagatgcttctgtggaaggaggggagagagggggcacccctggggatgggggtgccggcagagaaggggagaagggggacgcatctatttgagacacataatcttctgtctgggctggaggaagctttgttaaggtagcccgggttaataccggtctgcatgttgtgatttggcattttgacatgaattcaccctttgtgtacagggctgctgctgacacactgagactgttttcctattaggaatatagatgtttttgtcccaagccaccctcatttttatttttaccagataggttcctcatgaccacggcactgatttgagagctgggtgacaggcacccagagaccatcgcataggtggtcccagagtctagacacctgggttctagctctggctgtgtcatcccctggtactccagcagcaggctttctgggtcctggttttctcatcaggatgacaaggggctggaggagctggccttcaaggttccatccagttgaaagatctgtaactccaggacgttgctgaggctttttgaggccctaaaagcagactacccaagctattaagggtccctttgcatctgtgctctgcagagaagaggctttgttggccaggtgggcacagatgctggtgtactggactcctgatgggcaggggcctggagagaagcagcacccagcgcttcctatgcttaaagaaaggcagggtcctggtcaaagggctgtaagagcctgggcaagtccaggactagcctcaccgcctccttctttctgtctcgtcctgagagatgagctggtgactgggtgcagtgggggggcgggtgtcttcattctaggagtcaccaatgcctgtccccactaaccctctctgccaatgtgttttctagattcccaacttcttctggagcctggggatcggtcacactggtgcgtggtggcatactgggaggagaagacgagagtggggaggctctactgtgtccaggagccctctctggatatcttctatgatctacctcaggggaatggcttttgcctcggacagctcaattcggacaacaagagtcagctggtgcagaaggtgcggagcaaaatcggctgcggcatccagctgacgcgggaggtggatggtgtgtgggtgtacaaccgcagcagttaccccatcttcatcaagtccgccacactggacaacccggactccaggacgctgttggtacacaaggtgttccccggtttctccatcaaggctttcgactacgagaaggcgtacagcctgcagcggcccaatgaccacgagtttatgcagcagccgtggacgggctttaccgtgcagatcagctttgtgaagggctggggccagtgctacacccgccagttcatcagcagctgcccgtgctggctagaggtcatcttcaacagccggtagccgcgtgcggaggggacagagcgtgagctgagcaggccacacttcaaactactttgctgctaatattttcctcctgagtgcttgcttttcatgcaaactctttggtcgttttttttttgtttgttggttggttttcttcttctcgtcctcgtttgtgttctgttttgtttcgctctttgagaaatagcttatgaaaagaattgttgggggtttttttggaagaaggggcaggtatgatcggcaggacaccctgataggaagaggggaagcagaaatccaagcaccaccaaacacagtgtatgaaggggggcggtcatcatttcacttgtcaggagtgtgtgtgagtgtgagtgtgcggctgtgtgtgcacgcgtgtgcaggagcggcagatggggagacaacgtgctctttgttttgtgtctcttatggatgtccccagcagagaggtttgcagtcccaagcggtgtctctcctgccccttggacacgctcagtggggcagaggcagtacctgggcaagctggcggctggggtcccagcagctgccaggagcacggctctgtccccagcctgggaaagcccctgcccctcctctccctcatcaaggacacgggcctgtccacaggcttctgagcagcgagcctgctagtggccgaaccagaaccaattattttcatccttgtcttattcccttcctgccagcccctgccattgtagcgtctttcttttttggccatctgctcctggatctccctgagatgggcttcccaagggctgccggggcagccccctcacagtattgctcacccagtgccctctcccctcagcctctcccctgcctgccctggtgacatcaggtttttcccggacttagaaaaccagctcagcactgcctgctcccatcctgtgtgttaagctctgctattaggccagcaagcggggatgtccctgggagggacatgcttagcagtccccttccctccaagaaggatttggtccgtcataacccaaggtaccatcctaggctgacacctaactcttctttcatttcttctacaactcatacactcgtatgatacttcgacactgttcttagctcaatgagcatgtttagactttaacataagctatttttctaactacaaaggtttaaatgaacaagagaagcattctcattggaaatttagcattgtagtgctttgagagagaaaggactcctgaaaaaaaacctgagatttattaaagaaaaaaatgtattttatgttatatataaatatattattacttgtaaatataaagacgttttataagcatcattatttatgtattgtgcaatgtgtataaacaagaaaaataaagaaaagatgcactttgctttaatataaatgcaaataacaaatgccaaattaaaaaagataaacacaagattggtgtttttttctatgggtgttatcacctagctgaatgtttttctaaaggagtttatgttccattaaacgatttttaaaatgtacacttgatttcatgttgtcctccaactcctttttcttctgctgcttggagggagtggggaggagtgagtattcatccaaattcagttgagttggcgtcttcccagcccagtgcttggaggatgggagacgtgggccacaaaagagacatctagaacagccctggtcttcaagagtgctggaaagacctgcagccacccagacatccctccttcttgtgtcttgaatttgtaatgggagacaacctacaggagctctgtgggtgataattcaaagcttgtagaattgaggacagggaattacatctagggtaatgggaaggagacaggattagaggatggatggatggagaagtttagccccaagaacctgggtccatctggttcttgccaactcctcacttggtattaaatcctaagcctactgtacccctgctagactggattccaggagaagtttcctgggggctgagaccctggaagggtgatgaaggtgggggttgaatgtcagtggtgttcagagggactaggccacctcctggcgccctcccaaatactgtcctgggccacagaagtcacagagtacaagttccactctgcaatatcgtcc

SEQ ID NO: 32 - DNA, 94673 bp, Homo sapiens
gagagtgtgtgtgtgtgtgtgtgtttatgggctgtttctaataagcctgacttctcctggaatcactgagacttacctgctgccaagacatgtccaaagatgacctcagacacatcttccggagccacagtggccctcttcaagacttctttgatgacagtggagcccaggtcctggacaggaacagcagctaaggcaccattgaaggaacctacaatagaaaggcggagagcgtggacatcacaagcctgcgggtaatacgggaaccacctacgagcaggggagcctcatgaccctgtttggcaaggccacgcgaggaggcagtgccctctcctcccacacgttcctacacctgctggtctgagcaaaggtcaaggtgggtgccacaactcgcagcagccgagggctggacaggcgacctccagaacggcctagggacgccgctgtagcccttctatttccccaaatccgaaggactggatgcgaccccatgcttcccaaacaaaaggaaccggcgggtcaagggcgttgaaaaccatgcggcacgaaggagacgaagtcacgacttctagccattgtgtgacagcccgaccccagcccaaagccgggctcagaccacctagcagttccgcccctgccgcaggcattaccgatggcgcctcccggagccggccaatcaggggccccggaggagaacacctccctacgccaaccaatgggagaggcaggccacgcgatggctctaccccgggagccaatccaagcacgagggacggagtgcgcacatcgggagaggagagggtggggctgtagcaccaggtcagggaacgcgggagccgcagggttccagggatcccgcggctcctcgcggcttggcctgaccggcttcctccacatacgcccctctcctacacaagtccggccctcggcgctcctgccgaagcagcaggcgcctcggactctgcgcggctcccgccggccactcacctatgatggtccgcgccgccgagacgatgaccacaggatctgagcctgcattcatcttgcttctcctgccgccgtctgccctgcgctgcctgcaagctaggcaaagctcctcctcgcagcccacaggcctgccgcgggcgggacctgaggtagccccgcccctcgccctccacctccccgcgcaccacctccccgcgcatcccactgtgcgcaggcgcaaggccggagcaggggcgggcggaggcgcgcggggcgcggggcgcggggcgcggggcggaagtgaggccggggcgcggggcgcggggcggaagtgaggccggggtctgggcttgcgggcagaaccgcggacctcggacgcatttacagagcgcctgaaaccccagtgtttctggacaccccaatgttggagttccccgacttgacgtcttgggcttttttttaaaaaatcttagggtttctcgaaacagtaaagactggggggtgacaaagacttatctctcgttcagctcaggactggaatcccacgggcgagaatctcgagtgcgagcccggcccgcggcgggtctcagcacagctctgatgggtccttttgctctcggcggcttcgggaggtcctatgcgtttctcctggcgccagtcattcgctcgcgtgaggggcttgctaggagcgtctcggtgcgagccccctgccttctaagatcaactctggctgtgaacgggtgaggacgccgggagcgtcttagcgtcacaaaagttcctttggttgacgtttggacagtgaaaggagcatgtaacaagtggggtcagttttgtttaaaaccctttctgacttcccagcctcttactgggcaaagttcataatttttctgagctttctagggtttccaggcaagcttatgaggggccaccgttacagcaacttgttgggaacacctggatagtggaacaagaaagctttgtcacaaagtcatgaaggggaaaactgttgacggacctggagaatcttcctgaagaactttaaagttgattgaaagaatcattaaatcctggaaacctacattaagactttgcagagatatgcggatgggtcagataaatcagagaaggtaaagagtgtaggccccagaggtggggcaatagagaaggaaaaaaattgcataacagtgcaatttcaggagaaatctttagggtctggaatagtggtgaaatcagctgtctactctgctaagaactcagcagcacactgaagtctcttcagttgtcttcaatgtgtttcctgtcccctaacatatctgagtccaaggaattcaaggaatgcctcccgtggcttttgctctattctatcccattttccccttactccctggccacttctgagtctttgtgggcttactctcacatccccttaacatgttccccaaggctcctactttgcaccagctccctgggtaataccagtcattcctacggcatcaatcaccacctgtatactgacaagtctgaaatccttacatctaacctcgtctcctaagctgactgaccctcttcatttaaattcttacaagcacatcaggtcgggcaccttggctcacacctgtaatcccagcactttgggaggccgaggagggcggatcatttgaggtcagcagtttgacaccagcctggccaacatggtgatatcccgtttctaccataaaatagaaaaattagccgggcgtggtgccgtgcgcctgtaatcccagctactggggaggctgacatgggaaaatcgcttgaacctaggaggcagaggtttcagtgagccgagatcacaccactgcactccagcctgagcgacagagagaaactgtctcaaataaataaaatttcctataagcacatcaaatttgacatattgaaaccaaactcttccagcctgtttcttctgtaatctcagtgagcagtgaaactatcttctgttaaccaaaccagaaatttacctctgaaactccccctaaacatcacttcttccagaaaaaccttccaatctcctgcatttggtgcagcatcttacccctaacttcctctttcaacttaccatgtaattcctagtttatctgtctcctctactgactacataagctttccaagatgatcctgttacactgctttatgcacagctcctagcacattataggcagttatgaatgaacaccaatattctttatggccagtgcctagcacatttgaatgagtatgaatatattcttctggagccaagggatatagagtttcctgcctgaaggctctatctagagtaagtttaggagccaatcttgagaaggtaattgcatgcttctgctgagtggccaaacagaatctgtcccctgaggagtcctcattatagctactcatatgattatctactcatatgagacagacagagactaagaataatgaatgaaggaaagaagaggaattttttttttttttttgagacggagctcgctctgtcacccaggctggagtgcagtggcgctatctcggctcaccacaacctccacctcccgggttcaagcgattcttctgcctcagagtcctgagtagctgggattacaggcccgtgccatcatgcccagctaatttttatatttttagtaaagacggggtttcaccatgttagtcaggctgatctcgaactcctgaccttgtgatccgcccacctcggcctcccaaagtgctgggattacaggcgtgagccaccgcgcccggccagctggaagataatttttaaaattatgtcttggccggccgcggtggctcatgcctgtaatcccagcactttgggaggccgaggcgggcagatcacctgaggtcgggagttcaagacctgcctgaccaacatgcagaaactctgtctctactaaaatacaaaattagctgggcgtggtgccacatgcctgtaaatcccagctactagggaggctgaggcaggagaattgcttgaacctgggaggcggaggttgtggtgggccgagattgcaccattgtactccagcctgggcaacaagagcgaaactccatctcaaaaaaaaaaaaagaaataaaataaaattacatctagatctcaaatcataaactacctggactggtgagcagggtgagtgggcaggaagccacaaaaatctccaagtgcttactcatgaggagccatcattacagcagtgctatggagccagtttatcctgaaggggccttctcagcatcttcccccgctggaagatgcaatcattcttggttaagtttcataaagagttgcaggagtccaagccaggtctttgctacaggctggattcaccaacctaccatgcagcaaattcctccttggtctccatgaggggaacagtgaatcaccaaagtggaattgccataggatgaaggtcagcagtgtactccttaccactaggggctagctcaacactccctcagcacagccaccccatgatgggtccagatcagttaatgacattacctgggattatgaaagtgttcactataaccacagggataggtgaactcccaagacagtgacgtagagcagcaggcaatgatttgagtacagggcataactactcatgaaagagggaacatctgagaaagtaagttgtcagaaggaatggctttacattgttttgcaaaagtgtctcaaaaactggagtagtcagttgtatccaatacacctgaggagccaaggaaactgacatctattgcgctctctgtatgaggactaccaggaaccaaactggggcaccaatcagggggcactgtgatctttagacttcccagcctccaaaaacagtgaggaatgcgcgtgtaaagccacccagtctgtggttttttttttttttcacagcagcccaagctaagacagcagtgagtgctcttacaggggagaaaaacaaaacaaaatatcgagcctcgaggatacatttgcccaaatcagttaagtgtaataccaggattcaaaccaattagatgcagaagccactctatcacctctcttatcacaggcataccagaaaataaagcatccaattccagaaatgagaaatactgactctgtgtaccacagaataagtgctctgagttattcatcaaggcagactcaacagaaacatgaaaatgtcacattaacaggtccatattaaattcagtcataaaattgtatcactggttgaaaaattaatttcctatcacaaactcttgattacattacaccaacaggacagagaaattacatttttgtttaaattggtcaagttgaaggatgtacataacaaaagccaaacacagtatctgatatatcaaacaccaaaatgtttaatcacatgcaaattaaaaatcgtataggattttttactcacttgagcagactgtagaaaaggttaatcaaggttgggcgcggtggctcacacctgtaatcccagcactttgggaggccgaggtgggtggatcacaaggtcaggagttcgagaccagcctggccaacacagtgaaacctcatctcttctaaaaatacaaaaataagccgggcatggtggcgcacgcctgtaatcccagctactcaggagtctgaggcaggagaattacttgaatccgggaggtggaggttgcagtgagccacgatggtgccactgcactccagcctgggtggcagagcgagactctcggcaaaaaaaaaaaagagaaaaagaaaaaaaagaaaaggttaatcaagagacagtgcagtatttaacatactgctgaagaccggatatacctgtatcagctaaacaagcaaaagcagcaattactttcaaataagttgtacctcagttttcgagtattataactccactcccaaggttccttgattgtattacaagttatgtctaaaacaatactttgcttttaacagaaatggaatttcatttcaaccatatatgaaagctacacatttgaaggccattcaatatcatacttttatacttaattacctctgagaaaatggagcaaattttgacattcttccaccttaaaaacattttctcctacctacattctaacaccccttactcatataatattaccagatatgttgttagtaaaaatcagtagtgctggccagcgttttaaaacaaacatcactaactacaaagatactctacttgaaatcaggtcacaaaaaaccaacgctgcttttcaattaaaactcaaaaagggccaggagctgtagctcactcctgcaatcccaacacgttgggaagccaaggcagaaggatcccttggggccaggagtttgaggccagcctgtgcaacatagcgaggccttgtctctactaaaattaaaataaatgtagctgggtgtggtagtatatgcctatagtctcaggtactcggaagcctgaagtgggaggatcacttgagtcgaggactttgaggctgcagtgagccatgactgcaccactgcacttgagcctaagtgacaaagcaagaccctgtctcaattaaaaaaaaaaaaaaaaaaaaagcctaagaaatagatgactattttctttatacttttctgtattttaaaatattttgtaacaattataagtcaagaaaaaattttaagtgtagccctaaactccagctccgttttgcaaaataaggcataaattaaaaattgtgtgcaaaatcgtaatcgatgcttggtcttaagtttgactgttgtggtacttgaaggataatgagtagaaattcaatgactcaatgaaaatgacaaatgctaaacatacacccaaaacaaaacaaaaaagctaattaaggagttacaataaaaatctttatttaggtttggtcagtacaggtaagatatactggagtcacagagcaatatgcattaacaggatacaacagttcataaaaactgagtaactatgcacacaaatttcttaaacagtcacctaaagagaaaatgcacagatgtatggtggaaaaaactgtatctaacactgaaactactacaggactccatcaatgagtccaacttttagtgataaaaaactactgtactgggcaaacttggcagtcataaacccacatctactctaacaagtctgaatggtgcataagtacagtaacagcatgagtacgaatgcccttacacagcacagattctaaacagacagatttatacagacatcattgtgttgtattttaaggaaaaatttccatttacaatttcacattaactcatataaaaataacttgaccctacacaaaatgtccttttagcaacattcaaagtaattaactgttacaatttccaaagcggcagaagtattgaagcaaaaaaaaaaaaaaaaaaaaaaaaagaaaagaaaaaaaaaacaaagaaaaaaaacaacaaaaaaaaaccaaaacgtacacccacaaaaaggcaaattgtgacaaaagtatgcattaattttctggacagtatcctctcccaaattaaatgacactgtataaaaatttgctgaaaaaatattacaaaactgaaccctgtacatttacacttgagtccaagccattctgaacgtggcgggaacccacagttcgattacctttcccactcactgctttctcctcttgagggtcatgactggagtctgtgtcatttgattggtgtgtgagagagttttcactgcccgtgggagagtctacactttcataccccgcactgagttgatttacgtaaccactacctcctctgccagttctctcctctgagctgttggaggacttattaccattccctggagaagaaggaaagtcatcttcggttgtgttgccctccctgtgaaatccagacccagacgtcctctggcgggaggagctaccattacttggtccgtttgtcagacgactgcagtctttacttgtggcctctgactgttctacaggttcagaagctgtagtcctgctggtacttggggcagaggcctgagactgctgctgctggtactgagccaactgctggcgtgtctccttcagctgctgctgcagaactagaatggtactctgcataccctctacttcttcatcaagctggatgatgaagtcattcagttctgtgcaaaggagagtcagaccaactttaatatcgtttataacattgaaaaatgtttctttagtgcctgccacaaagcaagggagtcaataaacgctcaagtaaacaaatacaattctaaaatcacactacatttaaaaattttgcttggaatcttaaaatatgactgagtttgttttgggggaagtcagatacttaaaataatatacagttggccctccacatgcaacaatgaattcaagcaactgtagaaggaaaatattcaaggaagaaaaaactgggtctatactgaacatgtacagattttttttcttgtcattatcccccaaacaatacagtaaaataactattttcctagcatttatattgtattaggtactgttaatctagagatggctcaaaggggaagatgtacataggtttatatgtaaatatgacatcattttatatgaggggcttactgtgggaggtcctgacaccaatccaccatggataccgagggcaactgtattaagcaaccaagttaaaattgttttgatccatcttgccatatgcctgattacagccccaaagtttgactcacgtttacctatgggcccactatggccaatccccttattcctgatccagtgccttagttccatagcaagtctgatccttaaggatagtgtggtcctctataacactccaaagaggcccatgttctcaaccaaggactgttacatataaaaggacaaaagtcacaggaaataattcctgaagattttgaaaaggtaggtagttcagaagaaattacttggctactgatcatctttgcaattaaccagagacactaattttcaatttaaaatttcaaagaatttggatattttccttattaataatgcaccttacaaagaagagaaacagagatacagctacacttgcactaaaaaggatggaggctgacaagttttatctcagcaaatttaaagattaaatctcttattcactaataaaaccttcacagatacaatcaactttattactttcagatcgctgaaaactgcccatgtttctaagatttacacttaacgagaaatgcttattctccctttcaaacaatgaatacaaatttgtccatcttgttaagtaatacaacacccttttatcttttaccaaatcctacccccaactaaaaacaaaaatgtaagaaattttgaacaataaagaattaggagggtggggataaacaaactaaaattatatggctttgtttgcggactcaactaaaaatgcttcactcacaataatatacaatcatagggcagaggttaacaatgtacagaatctaacctataatattcatgactggcagttttaaaaagccaatgcaaagttgagacaacgttccaaaaagaaacaaaccccttaccatcctgactgcttttaagctcctcactgtatttcttctgtaaagccaactctgcttcaagttgtgcaatacgtccctgggacagctgccttccaagctcttgattctcctggataagcattcgacacttcgccattaactttttccctgtttggctgcaaaggaaagagccatccatcacaaaatgaagacaaaactctctgtctttgcttacaattattacagtgatagatgtaacacatacaaacataactatatcacagcagatgcttccccataattaccatcttcttttctgggacacatccatcttctgcatttcagtattttgccaacacagcagtaaaaataaaccctaaacaaaaagtgcccaaacagctacaccttgtttctattacatcaataatcaattctgaaatccatctattttcatctcaaattatcatttgaaatggaaacagagccagttaattaacacacaccttggctataccagtattattacactaaggaatctagcgctttatcagaaaagttcttgaaaaggtacatgcaacatcaatcacaaatatttatgaaaatcagtacctacaaataaaaatgaatgagagtatttattcttgctagaaaaacatttaataaggattttccttaacaggaagtcctccagcatgggcaacatagactccaactctacaaaaaattttttaaaaagtagccaggcacacatgcttgtagtgccagcctctggaaaggctgaggtgagaggactgcttaagcccaagtggttgacgctgtgaccatgccactgcattccagcttcggaaacagggaccctgtctcaaaaaagaggaggagagagggaagttttctggtacatccatcttccataactctcaagaatattatctattatattaattgaggcacattcagcagttaaggttttttttttaaagacttaagactttattggaaaagatcatccttttgacacaaaaataagaccagtggtcacgtatcacaattcaaacacgcaaatatctgccaatctaggagtgtcacactttccacagattatagtttccaaatgctagtgcaacatactactgaacctatgtgcacatacatagcaattgcaaatatgtaatgaaaagctcaaatgtttcccaataaaattttactgcttttctttagcctcagcaataaaaggagaaattatttgcttgttcttgtaattatttatgaaaaaagaaaaaaaaagaaatgatcacttttaaagggatctaagtaaataattgtgatatttacctttgagacttggataaagacagtgtgacattcttgtccttggggtaagtccaggatgaccttatgggttaaaacattttttaaattctagtctttccttcttctagtgaggctttcacttgcctgatacactacttcagtatgccttataagtttaaaaatgagagcattttgtaaatattttatcaatctttgaagtgttgcatggttctttcacctacagcattttttttttttttttgagatgggggtctcactgtgttgccaggctggagtgcagtggcgtgatctcagctcactggagccttgacgtccccaggctcaggtgatcctcccacctcagcctccggagtacctggggactataggtgtgcacgagcacccccagctaattttggatttttagtagagatggggtttcgccttgttgcccaggctggtctcaaactcctaagctcaagtgatctgcctacctcagccttccaaagtgttgggattacaggcatgagccaccgtgcctggctgcatgttttctaacctaatgtaattcaaggaaaagtttgtaattaagctttcttccagaaaatacctgaagagttcaacctgggttactactgctcagaggagcccgagggtgaaagccaccagtgagcatgtggtaaaggctttattctttgatatgataactttattagctggtgttcttgttcactgctactgtagctccagatttccaccatttcccatcagcactctcaggcgttagcctccactgaacatccacttagaaattaaacaatgggaaaatgagagatatgcaagattgtcaaaaacaatggaattccttccactttactgcctatgctctcaaaactgtcttcttgcaaagtatatatatttcattggtgtttacaactaaccttcttactatatgaattttaaagagtagaaaaagacaactgtaagatacattaatctgtgacctgacttaaccccatataaaaatgtcacaaattctaatgcaaaaaaggtttcgtttaaaaagtcataccttttaataaataaatgtctaagctaagatagtcatatcacgtttaaaactagtgattagtaaaataaattttaacaaaatcacagttttgaaaaaataatttaattacaagtagttgtttttgaaataattttttaaaattacaaacaaaaaaatcaacccattcctaaaatcgattaacccacaaacataatagaaagcactttgaaagatatacctctaaacactctaaaatgtgtgcattctcacatgaatgaaatattttaactgaactggacaggttatttctgggaatctttcttcctcaaaattagaacagaaaaacagtaaagcgaagacacacacgtgcgtgcgcgtgcacgcaacccaaagcaaaacccattccaccactggaaatattccagacgggattgcctgagccattatttgtttcaaattagtgatgtatttatagtacctgatatactctggcttacagccaattttatagaaaaaaatccatttataagtgattcaaataaattatgattccttaatataacggaaatatactatgtaagcattaaaaatgtagttgtctagatacattaaaaaatggaaaaatgccaaagagaccaagtaaaaaaaaacaaggtgcaactcatctgtgtttatggtatgatcacatttgtttaaaacaatatacataaaataactgtatatgcatagaaattatcttgatgatacccaagaaaaagtaatagcagttactgctcttggagaagagaatgaggatgtcaaggtcacatccgggagtgacactcacttttcatctccccctttctctacagtatttcaattttatacataagcatgtattatcttattaaaagagaaaattttaacaatgacaagaaaaaaaccatagaactcatgactgttatctaagtgtcaaagaaagatgcctgctcaatttgagtacatgttaataatacattttatggattactcttctactaaaatctactaaaaagatacttaggccatttctactgtgaacttaaatggcataaaatatttacaaaagccttaatgcaagcacataagctaatttcaaacagatctggttacttaccctccaaccctcacaaatagtgagaattttagaagcagatttcttgctgaaaagtcacacaaaccacttcttcaacccaccctctgccccacaatcagttccctaaagcacaaacatatgatacttacaattgatttgaatgattaagagagaacttaagtcacccttgttaaaactgcacttaaacgttgggacaagctggaacatttatcttccactcatcttagactccattatcaccaagcgaaaatttgaattggtgacttatagaatgatctgacggaaaaaattcacctccaggattggatggaagcatgaagaaaataatgcctcatttatctaaatgattaaatgaatttgctagaaatgatcactataccttttttcaattcacaaaatgtcttacttaggccagcccacagttccaacacattatcttctggcagacaccctgtgaagctgtcccacattactttctactgcaataccctgggacaaagtgtcataaaagtaacaagtgtcaagtctccttgtcttttatgtaggtcttttaaaaatgaggcacagcgccttttccttcactttgaagagcacagcaacagtatttccaaaatgaatctgctctcaacaggccctccccgccccaaattaaaatgttaaagagtacaacaaaatcatcataatattctttgaacttaaaaaaaaaaaaaaaccaactatttcaaggcacatttaatttaatatcaagagtgcaatacaaaaggcccaaatacaatgaaggaacacattcccccattaacaccaacgacaaagctcttttaaacatgtgcctgttgaatggaacggggatttcataaaattcactaaaaaaaataatgcagtgagtctcatcacagctaatatccttatacaatctagttgtgaaatgaatgtttataatgcttcaaacagtttcaacctgaagtttgataccacaccttcatgtttgtacagtcctcagtaagattatctacagtttttgcaaccattcaaagaacaaaccattgaataaaaccacattgattaaggctcaagcaagtaatatagagccccaaactaaatggttaaatatatgcgctacttgtacggacatctattatttgattctctcatgactattgaaagttggttctcagcaaataaaccctttaaaggcaaaattcacctcatttgagttttgacccagaagttcaacaacaatcatgaagtccacagtcttattggcaaaactgatacacagtgtctctaagtcactatgctcaaggttaagagcgatgcatattccgtttttacattttactggaattttacatgttcaattcatgatttaaaatctctaggttttcattccttcaaactgtctgaagacacagtgtgccacagacttaagacttctgtttctccctctattttcttcaaacagaaacatttctcaagtgtctacatgttctagaaggggaatttttcggaggtggccacttcttcggaatagtccgacgccatcaggcctctgaagcaaggggaaggggaaaagaaaaaagctgaaacacaaggttcatctggtaagttttacattaaccattacaagctggacagtgtaagaatgtggcttttttttggctcaaaaagtctgagtcttggtgtggaaacgagtacttggctgtcccaccacagctttctcgtagtgggactgtcagggaagtcttgactggggagtatgatttgtttacctatcaggcgtaaacttccaggcactcagttcattttgggcttgttccagtttgtctttagtctgttccagttcacctttcatttttaggaaaaacaagttgatcgctgggtctaccattgttgatctcagttgggcaacgctcggctgctggacttgcttgaggtactggatttgagtctgtgcaaagcaaaagaaacaattacgaccaaatcaaaggaaacatacataagaaggtggggaaaactccctccattcacttgatttaccaactctttcattaagctcctcccctctttgatcctgaaattctctagaaaaatcttaaaactttctagaaaaagtacagactaaaaactatttgatgaatatgctaattaccccgatctgatcactatacattatatgtattgaaacatcactatgtagtagtccttgaatatgtaaaaaacttatttgtcaattaaaaaaataactatttaaggttactcacttaggaattgaggccatttgattacatctccaaatctgggacttaaagtggctacatacattttactttacaatccaaacattaccaaaaaacaaacgaaaatcaacattatatttactaaaaatgctgacaacccagtggaaaaaagcaaagtttaaaatattaattacctaagagttaatgaagtctttggtttgcttaattttttacctgtggaaattattctatgtaaagtcccctaaaaatacatcaggtgcaagattataacttaaaatacacatttgaatttctaaaggaaaaaatatacagtacttatagctacaagagttgctgttacagctttataaaagcaaaactctataggaccttaagccaaaataaagtataattcatatttttccccttctgaatagatccgaatcatagaattgtaaagctggaaagtaactcacctaatccaaactgcttattttgagattaaataacccaactgtttagttcagtgccatagcgggactacaattctagttctccggccttctgattcccagtctagagctttttccaccataccagaacccttctacttacatatgaaaccttcaatttcgacttcagttgtgctatttactagcacactaaaaatacatttctaaaatatgaaatatagttattagcattaaattcatcattttcttcatactcaaagtagatctggcccaagatctaactccatactaaggcttaaataggattacagttaaaattttctaatataaatttagtaaaaggaacaaatatactaagtggtttgggaatatatttgtttcactgagcaaaaatctagtacaactgcatagtcaatgtgaagccagctgctaagataacagagcgagaataaaccatgacttacagtgcactccatgtactgacaggactgattaaaacagtctacagcactgactgagactcagttactatttagctttacaaagacccaatagtcaacactttcattcatgaaaagagaggtgaatcagactagaataaattccatgttctagggaagagaacactgagtaaagtgttttcaaagttagttttattcctaaatctattttgagttgattggcaaaagactaaatgaaaaacagaaataccactgaggtgaacaaaaatgacagattttacttaccaacaaaataaaatatagttaagaatacagtatatagttaagaatatagtaactacgtggctaatttatgccttacgctcaaaactaactaaattgactactgatgtacttggcaaagactgcatgtagacaaagaaataaagcattattattaaaagatcaaatggatgagttagtatgctggacaaacaaaagatctacacaaatagattcctaaggatgtatattttattttttctaagcttagcttaatttgaaacaccaagggtaaatgcagcagctctgttttaaaggacaggtacctaatacaaacctttccactatttttcactcaagagggtaagaaaccctccttctcagggccaatcctttcaaccattcgcttaacctattccctccaaactcctatagtacatcactcccattctttctactctttaaatttagtttctctcacttcccacttgacagttcctctagagcaggggtatccaatcttttggcttccttggccaacaacctcttaactgccaaatctaacgaacaattttaaattcgtattgtacagaactttatgtatgcctttgttttaatcactttgtattttggggaaggaggagggaatgctggatttcctgttttcctaacaccacactctactcttcttttaaaatttgatctttgtaggatctatcctagtagcatcgttactcagtcaaacaagacaaacctgaagctgtgattcctccctagatttttttcattccttccacaacagcatccaaactaaacaagtcctattgattgtgcctccaaaacacctattctgtcctgtctgctaccaccagtggcttcatgtatttcatctgaactattttaacagcctcacaattggttttcctgcttaaagtcctgttcctctcaaatctatctttcatactcaagtcagagtgatctacctaaaatgtaaatctaaatctgatccatcacatacatctcttgctgaagaattcttcagtagtcccctctcttctagaatacccaagattccaggctgacctcatcttttttcactctcacctgaaactttatcctcatctgccatatataatcttgacctttccttgtgattttgctcctgctgccctgccctgtctgcaaaacctcacttgtattataattggaagaacaggaagttgttcagctggcgtatgcaggtgacagctgttttaaaaaaaaaaaaaagctggaaaaggttaggttccattatagttgaaataaccttaaaatccaggtcgaggagacaagagtgatgaggtatcaccgaaggccttgaccaggcgtaatatgatcaaaactgccagcgcatataggacagatggagaatcagatgtgcatgaatagcacaaacattgtgatgtgcacacatcaactatgatgtcaagagtaggaatccggaagagaaatggaattcaagacattctgatcctatgagatattaccatcaacaccttctattcacactctatctcccaagtgctagcagtctaaaggtaagatccatttctcgtgtaaagggaaatttgttaaaacattcattagtaactatggagaaagaagtatcagtggtggtaagaattacaacaaaactgatagaaacaaaaggacaaaatgtgttaagaaggtagagaaaatgataatgggccaggtgcgatggctcacacctataatcccaacagttttgggaggccaaggagtaaggattgccaaagtacagcagttcaagaccagcctgggcaacatagggaagacctcatctctacaaaaattaagaaattagctgcgcttggtggcgcacacctgaaatcagttactcgggaagctgaagtgaggtgtgattacaccactgcactccagcctggatgagagagaggccctgtctcaagaaaagggcgggggggttagtgggaaaaaaaagtaaagaaaatgataaaagccagcctttagcaaagtaaaatgtgaagaagtcatttagtaacaagtgaaagaagagtaaatacgtgcttttgtggaaatttaaacaatctctgtaagggaagtaaaaggactgtgactgaaccttaaggaacattctattggcaaaagaaacagaacaggactgtgcccatagatttttggtgtctccaatgaccagaatactatcttagaagactttaataacacataagaagacttctatatgtaccaaatgaagggagagtacacaaagaattgaagaaacattcagattttaaaatcagaaacaaggatacagctgcctctaattattttgtataattacaccgtaagattgagcctaaactaccagagctggatgatcaattatgtcactagatttcagatctacgtagacatagtaaatactacacagtacacatcaaagttctaacaattaaaaaggagacactaaagaggttgctgacactaggaaaaacagttctatacacagaggggacaagagaacagagataaagtcctcagatggctttcctaatcagtgaaagtaaagcaataaagagcaaatgttcttttattgattacatcctcagacaccaagatatctgaaaaatgtctggaattgatgaactaatacttataaggcatgaaaatttcaaaaaaaacttaaaactttgccttcttggccacaaaaaacagtctaaatgagacattatcaaaatttttcatctagtattcttaaagctcaaagcatacgtacctataaaagataagctcttatatttagcattaaatgtttaaaattaacatgtaataatgtggactaaaaaccaattcctcaactaaagacatttatataacttgaaatacttacagtacactcttgcatctcttgttccttggttgctagtcgcattacaaggatgttttccctgcgtgcagactcctgctgttgttgctttagtttttcttcagactctcttaggccagttacatcattagctgatgattcaaaaaaaaattataaatacaattttaagatcaagttctaaatacctctgtcaagaacaataagaactagggtcaaaaaattaatcaagtctttagtttccatcctaactacttttataacaggcgaatttcttcctggtcacgagagctcctttaggagacaatggtgtcatagtgctccatgactactaactaaattatgtttttatagtttcatctactcccaacagaagacagaaaacatctgtgttatacagtattcacaaaatcctgattagtatgttttaacctatttaatataaaaatgctgtctgggcacagaggctcacgcctgtaatcccagcactttgggaggctgaggcaggtagatcacctgaggtcaggagtttcagaccagcctaaccaacacggtgaaacaccgtctctactaaaaatacaaaattagccagtcgtggtgatgcatgtctgtaatcccagctacttgggaggctgaggcaggtcaatgacttgaacctgggaggcagaggttgcactaagcccagattgtgccactgcactccagcctgggcaacagtgcgagaccctgtctcaaacaaacaaataaataaataaaatagtaataactgctggacaatttgtattttaaacttgaggcaggatcttattctgttacccaggcaggagtccagtggcacaatcagggctcactgcagcagccttgacctcccgggctctagtgatcctcctgactctttttttttttgtagagacaaggtctccctatgttgcctatgctggtctcaaactcctgggctcaagtgatcttcccaccttggcctcccaaagtgctgggattataggtgtgagccactgtgcctagccttaaactttcacaatgttcatgacttctatgggtaacacagtcacgcaaaattagaatttcagggtattaacccttctgaagttacaaaacaatatatattggtttttatactcaacaaatagtatgtgattcaaacagtaaaaagtgagactaaaatggcttaaaatgataaacgttattttcagcagatttaaaaaaatctgtatatattattaagttatatatattgatttaagctgtcataaatctgttactggttgcttctgtttatttctcttctagactagtaactcatgcttcaagtcaaattcctatgcagaaggggttagggacaagtaagaaaagtttcaagtagttctgagttactgcatctatattcagaaccttgcatataattttgctaagtcatgccattacatgactattacacctctgtcttctccaatgactgagactgtgtctcattcatctttatattttcttgcacccaacacagtgcctatgtacagttcttataataaaacacgagaaaaattacatttgctttaataaaaacaactatccttttgattttaacaatcaaaaggagattattcagtctttaggaagctaaaactcaaacttacagttaagatctgtgtacttgccctccaaagcttgtacatatgcttcatattgtttccatctaataaaaaaaaatccatacattagttgttacgataaaatagtttattaaataaactagaagatatctataaactcacagattttagtaatactgagcattcttctggatttttcattttaaatctagttttttttagacagagtctcgctctgtcccccaggctggagtgcagcgtggcgcaaacagggtctgggctcaagcgatgtccctgcctcagcttcctgtatagctgggaccaaaggcacatggctcatttttttgtagagatggggtctcactacgttgcccaggctggtcttgaactcccgagctcaaatgatcctcacaccctggcctcccaaactgctgaaattacaggcctgagtcaccacacccagcctaaatctagtttaactgatcataaaatagtccctcattattccttcccattttacaggaaacaggtaaaaagagatatatagagaaggttttttctgctgagaacatgccaagcatgccctgggtgagatcaaaccccagattcactttgatatcactgatgttcaggataatcctggattatagaagctgaaaaaaaaatcccactgctgctttcatatgttgtccacttagaacaaaaggcatattagaaatgtgcctcattatgtagaattgaaggttctttatcttggctcttttgggaaaataccatgtgactcttctcaaggtagtatcaatttctgcctgtaaacacagggggagaatataacatttttcaagactgtaatttaacaatcacatctaactgtcagaaacctgcataaatgccatatgctatcagaatacaaggggaccgttgttcttcattatacttctctaccctgaatatatacactgctaggtcctcttagcaataaagatttttcctagtcttattaggcagttcctaatggaaagcaccctgccctgaatgtctgctatcctgcatacttaagagccatgttttcaagctgctcttcaggtacaattaattaaaatttggctttagaaaaccattttataatcttaaaaacaggcttgtcatgagttattaatattacaacataatgaacaaaaaggctcgtgcctgtaatcccagcactttgggaggccgaggcgggcagatcatgaggtcaagaaatcaagaccatcctggccaacacagtgaaatcccgtctctactgaaaatacaaaaaaattagcagggcatggtggcgcatgcccgtagtcccagctacttgggaggctgaggcaggagaaccgcttgaccgggaggcggcggttgcagtgagccgagatcgcgcaactgcattccagcctggtgacagagcgagactctgtcttaaaaaaaaaaaaaagaaagaaaaaagaaaaaaaaaaaaccttcctaataccaaactaatccactttctatgtaaacactgatgttcagccaaggccatgctttatttttacggcacttacaacctaagacacgtagtttaccaaatatttggggatgtatagagaaagatcttcagtggaggctataaaagaacgatttattttagaagtacagaaaaatataaaaactgaagcaagaacatgtatatcacaaggatagaaggcacagactagttaaataagtagcagctggtttaaaatctccaagggaatcaaagagaaaaaactcgcctaaaagtcttacatgaattccctaaggaaagatgttaaactgacctcaaggaaatacactgcatatgatttagaaaccttaaaggtatcttaaaataaaacatttctatgattctttattaagattactgatttttcccctcctacagttaaatcaaaaaaatgactgcacagactaaccagagcaattatgtaagaaggcattaaaaaaagtatacaatgccagagacagggaaaaaaaaaatcatggccaggcatggtggcccatgcctgtaatcccagcactttgggaggccaaggtgagagaatcacttcaggccaggcattcaagaccagcctgagcagcacctcacctctattataatttatatgcacattaaaacaaacaaaaaaaaacccagcattgagtagtagtgtatcttaagtatatacttcagcataagacagaagtgttttagaataacaaaaatttaaattttatgtgcagaaagacaaaggtatgcaatggaaactgtcctatgtatgagattatggcaaaaaaaaaaaaaaaaaaaaaaaaaaaaaaaaaggtaaaaagtgtgttcataatacagtagctgtccaaaggtgaaagtaggaaattgtcacactctaggaaacaacaaaatctgtgttagcctatctcacaaaacatcttttctctcctccgctttcagcctgttaaaatacttattttatttttatctaagttatcaagaaacttactaaccatagcaataaaatacagaaagaatatatttaaattacaaaacacagaacatcctacttcctgatttcttacacaatctaaaaagattatacgttgtacttgacaatctgcttttgtaagacatttacaagataaccgcagaaattcagaactggaagtcacctttaacaataacttaacccaacctcttcaacttacagatgagaaaatgaagagtatgaagttatatgagctggtgaaggtcacactaataagaaaaagtaacctcacttcattagtaaattatgtatttcttccataaatataagtgcatcttttaggattacatttctttttcaaatgttaaacacgaaaggaaaaactacacaaaacaagccatatatttgttaaacttatagcttcctagtagttctttaaagtgttacgttttcctcggtgttaatataagaaataggtcatagtatgctcaaaaagtacattaaattatttgaggatagaacaacattaaaaacaatatctggcacaaagacaattacagtgtagagtcacaatataatgttctatagaaagactttgtttttgaacagagaacattttaccttagaattaactcatctcttgccataactttgaagtctgtttcactcaatcgaacctataaagagaattacaatatgaatttagtgttcttcctgaagacacaaagttctataatgagacctatgaaacatctcccaagtgtgagatttaaacggctcagtacatattatgattttttgaaaaagtattttattacaaaagttttttttttttaaggtaaactatttggtatcttaacaatgggcatcatcattaggaaaatgcacattaaaaccccaggtatcaccacacactgattagaatggctaaaataaaaattagtggcaacaccaaacgctggtgaggattcagagaaactgaagtttcctacactgcaggtgagaatataaaaatggtatctgaagaagtatggcagttccttttattaatacaactaaaaatgaatgtgccatataactcagcagttgcactcttaaacatgtatctcaaagaaatgaaaacatgcaagcagctttacttgtaaaagctaaaaaactgaaaactatccaaatgtcctttaacaggcaaatgattgaactatcatacagccacaccatggaacactttaagcaataaaaagaaacaggactactgatacatgaaacaatttgtataagccttaaggaaactgtgctaagtggaaggaaaaaaaatagtctcaaaaagatgcatactacatgattacatttatataacactctgaagtaacaattatacaaatggagataaattagtggttgccaggggtcaggcatggagagggacggggtagatgtggctataaaagaataactcgatgaagctttatggtgatagttcagatatgtatcttgattaatgatggttacacaaagctagacatgataatagtgcatatagctcttccccacttcccccaataacagtgctagtataacgtgaaatgtgaataagctctgtggattgtaccaatgtcaattccctgattttcacagttattagagatgtctgctagtcacgcaaggtgttaacaatgaagcaggctcagtgaaagttgcacagaacctctctgtacatttatttgcaacttcctatgaatctataattatttcaaaacaaaaagctgaaagaagggcataagctaacatgcttcaaaaattgagaaacagtatattcactacaccaaataaaggctgtaaaggtgagatacctctcctacctcagtataaaattaaggctttggctgggcattgtggctcatgcctcctgcactttgggagactgaggcgggagtatatcttgaactcgggagttcaagatcagcctgggtaacatggcaaaaccccatctctaccaaaaaatacaaaaattagccaggcgtagtggcacacctgtagtctgagctactttggggggcaaaggtgggaggatcgcataagctggggtatgaggccacaatgagccaagattgtaccactgcactccagcatgggcaacagagtgagactctgtctcagaaaataaaaaataaaaataaaataaaggctttattagtattcccttacaagacacttaaatttttttccttaaaaatgtttcaaattataatactaaccagtaaaatagtattaccataaaatggaacgagggaactattataatgtaacatattgaaaggctgccagaggcagctcatgcctattatcccagcactttggaaggcagaggcaggtggctatctcttgagcccgggagttcgagaccagcctgggcaacatggtaaaaccccatctctacaagaaatacaaaaattagctgggcgtggtggcacgtacttgtagcccccagatactcaggaggccgaggtgggatgatcgcttgagcccaggaggcggagactgcagtaagccaagattgcaccactgcactccaacctgggcaagagagcaagaccctgttccaagggaggaaaatcaaagggtaccagagggagcacacagtaattctcagattatgaaagcataatacaatcctttattcatttaatgagtaatctgactccacaataggaaacttctgtaatatctaaattattcacttaaatattaagtttagtaagctttcccaattgaatcacaaattcctcctagagacgatgttacctcttttataacagccactgtgtgtgtgtatgtgtgtgtatgtaagagtaattaaactcaaggtaggaatgcacaacagggggagatttgagactagacaacaaaacttcagagaaaaaggtagaatttgaaaattagctataaccatttttttaataaagtagtttttaattacaatcaaagggatttacactaggaaaagaataataatatactcataatgtccatttttgacattatttgtatatatgtacctggaaatatttacataatgaacattaagagtagacctggaaatattcacataatgaacattaagagtagaccatgggaatattattataactaaagttttccaaaatctgaaaatattctaaaaaatatactggatataagatacaatatctggcacactgtacaactccaatgctattattgttataaaggcaaagaaatgaaaaataagcaaacaacgataatcccttcaagtctatttttttttaaagtgcttaaaaaagcccccaaaaaacccaaaacaaaacaaaaaaacccaaaaccaaaacccataccttcttgggaagaggttcttcgttggtcatcttgaatcctaaaaaaaaaagttgcggaaaacaagttcaatttattttcttccagtgaaagtaggaataaaaaatactgactctttcaaatcaatttattagtgaactaaattactgttgaataattagaatttaaataaacaattttaaaatagttttagatttacaaaaaagtggcaaagatattacagagttcctatatactctgtacccagatcttcctttgttaacatcttccatcattagagttattgggtagtttttacaaattccctcgtaaaaaagctgatcagccattcaaatcatttgatgtcgccataaagggtgaagagaaatataatgacctcaagtagtatcctacgcatgttgctaagggactataaaagggtaataccagtttaagtctttccttttatagcattatgttgttaaagtaaggtagtacctaccacagccataatttactactgcccaatagttttttagatatattatatattttatttttattttttttgagacacagtctcactctgtcgcccaggatggagtgcagtggcgcgatctcaggtcactgcaacctccgcctccagggttcaagcaattctcctgcctcagccccctaaatagctgggactacaggtgcgtgccaccacacctggctcatttttgtatttttagtagagacggggtttcaccgtgttggtcaggctggtctcgaactcctgacattgcaacccgtccgccttggcctcccaaagtgctgggattacaggaatgaaccaccacgcccatcctattacatattttaaaatatatgttacactggttgggcgtgatggctcacgactgtaatctcagcattttgggaggctggtgggtggatcacttgaggtcagaagttcaagacaagtctggccaacatggtgaaactcggtctctaccaaaaaattaaaaaaattagcccggcgtagtggcacacgcctgtaatcccagctactagggagactgaggcaggaatcgcctgaacctgggaggcggaggttgcagtgagccgagatggcgcgccactgcattccagcctgggcaacagagactccatctcaaacaaacaaacaacaaaaactcacatacacatgtatgtcacaccttaataaaaatattcctacagtatttaattttatgccaaatattttgtatctcaaaattagcttctttattatacaaaattcacttaaccctgtttcaaagataggttaatgaattcaagtagggaacactttattatgctgttttttagaacgaatgctaatagcaggtattattcattaaactacaaatccacacacaaaaaaaagacaaagaaaaaatgtgtaataaacataaacaccacattaaaatacaaggttggaaaaaaaagtatacgacatgaagagctaacctgacaaacataaaatctttatataaaaattctatgaggattaaaaaattgaatcagggttctgagtaccagtgctcttttgaaaaagcatctaaattgcatttggcatattcataacttatacaaattaagtaattagttcttatactaatttagtttttcctattctttctttcttaagagatggggacccaccatagtgcccaggctagtcttgaactcttgggctcaagtcatactctcatctcagcctcccaagtagctagaactacctgtggaaggatcacgcccagccctagttattatttctaatagtatactcatgaatcttcccttactttaaagtgtttatggtttattttaattacccatacttattataaattctaaactactagaaatttgaccaaaagcttggtatgttaaactgaatttttttttttttttttgagatggagtctcactctgttgccaggctggagtgctgtggcatcatctcgaaagctacttgaggctggtgtggtggctcacacttgtaatcccagcactttgggaggctgaggcaggagagctgcttgagcctaggagtttgaaccgagcccgggcaatgtggtaagaccctgtctctcattaaaacaaacaaacaaaacacacacacaccaagactacttgatttctcccacttgattttgagattcctcaaaaggagataatcttccaacagcatgttttatactacgtacaatctcaactccactttataaatgaaacattctaatcatactgttattaaaccctggttttcagattaagtaaattgtgttgaagaaagcagaatttagaggaaaaatcataaattgatcttagattactggcttgcttctttctctgtttaatctttttttttggagatggagtttcgctcttgttgcccggggtggagtgcaacggcgcgatctcggctcaccgcaacctccgcctcctgggttcaagcaattctcctgcctcagcctcccaagtagctgggattacaggcatgcgccaccacgcccggctaacttccttgtatttttagtagagacggggtttctccatgttggtcagggtggtctggaaatcccgacctcaggtgatctgcccacctcagcctcccaagtgctgggactacaggcatgagccagcgtgctgggcttttttttttttttgagacagtctcgctctgtcacctagaccacagtgcagtggtgcgatgatggctcactgcaatcttgacctcccaggctcaagtgatcctcccacctcagcctcccgagtacctgggactacaggcatgtgccaccacacccagttaattttttgtaattttttttggtagagacagggtttcgccatgctgcccaggctggtctcgaactcctgggcgcaagcaatccaactgccttggcctcccaaagtgctggcattacaggcgtgagccactgcaccctgccttccctctttaatctttctcaagggatacagcaaacagataaaaacctcagtatttgtttctgagctaattgtatacagtctgtttcactgagcaagtcactctgtcctatgaagacataaaccatattactatgatataaaatgtatattattctttttttctttaaattggttcctcccttgttgcccagtttattatctctgctgccattacagaaagctgctttgtaactaccttaacctggtggcagtcattttaatcatctcagaaaccatcaccatatttaactccacatgtctaactacttctattttagcatgacacatgcattaggctgcaaagtcttagaacccagatatcaaatctggcatttccttgtaatttcccatttgtctggagctaaatatcaattttacacacacacacacacacacacacacacacactatatatatatacagagagagagagagagagagagaaagaagcagacagagacactccccctccccctgcgcccggtctctgttgcccaggctggagtgcaatggcgcgatctcggctcactgcaacctccaccgcctggattcaagcgattctcctgcctcagcctccagagtagctgagattacaggtgcctgccaccacgcccggctaatttttgtatttttagtttcaccatgttgaccaggctggtctcgaactcctcacctcaggtaatccacctgctttggcctcccaaagtgttgggattacaggtgtaagctactgcgcccggccaataatatttttaatttaaaaaatcttaaagacaattttagctatttgagctgtacatatttaaccggtatatcagtatctgtatctatgtatatacgaacataaaattttgagaaccaaccaggaacttcacgtaacaggtactgtggtagagatctgtgaatgacagtttgaaaacagctatatttatcactatggctaggtggtataccttttatctagttactaaggcatcctacctactcagtatgtacaactttagttgtaatactaaagtatcatggatgctgttcaatataaattccagcttataaaagttattatagttggtccttgaccaacccaggttttagctgcatgggtccatttatatttggatttttttcaatcaaactcagattaaaaaatacagtactcggatcaaaaatacagcattcacgggatgcgaaacctgagtatgcaaagggcagacttttcatacaccagggttcaaattcctatgccaggattttggcaaggatcatcggtatgtggttctacaacctgatactttccctaggtttacttgcttactctcttcttaaagacaggtatccatattcttattccactaaaataaaattaacagtaagcttagcaaaaaatgagatgataatctgtttttaaagggcattaaaaggactgagaaacacatgaagaaagttctgataaccttggtattctgaaacaggttgtcaactttgcaaatacaaaagtagcaaaatctctgcacctcagtttccccatctcaaaaagaattaccacaaccagggcccaaatactgtgctatttctgaagacagacattaatctttagcatggtaactggcacaaaatgggcatttaattaatagtttcttctccccatcaaaaacacagactcagtgtttcttgaaaaacctgaagagataatccacaggttgaggataataatcatactgtcctcccgactgtttctaacacttactgcagaattctttggcatctccaatatttaggattctaaacagaagttacttaaattttctttttttcctctctttttttgagacagagtctcactctgtcgcccaggctggagtgcagtgactcgatcacagctcactgcagcctccatctcttgggctcaactgatcctcttgcctcagcctcctttgtagctgggatcacaggcatgaaccaccacgcccagctaatttgttttttttttcttggtagtagagatgaggtcttgctatgttgcccaggctggtcttgaactcctgggctcaggaatcctcctgcttgggcctccaaaagtgctgggactacagttgtgagccaccatgcccagcctgcaattattgaaatttcttttctttttttcttttttttgagacgtagtctctctctgttgcccaggctggagtgcacgggcatgatctgggctcactgcaacctccgcctcccgggttcaagcgattctactgcctcagcctcccaaggagctggaactacaggcacgcaccaccatgcccagctaatttttgtatttcttttttttttctagtagagacagcgtttcactatgttggccaggctggtctccaactcctgacattggcttatgttctttttaaaaagtttgatggtgagtagattttaattaaatggtgctttttattgaaattttctttaaaaataaaactctgtatttgtaatgtaagtcaggagtaaatacagattttggataaatgtctacacttcctaagtcaactctcagagtcacttttaagatcactctagctgtctggggtatccaacttgggaaattcagagcctcagtatttagaaagaaaatccttcctcaactttaatctgatgaaaagtaaatctttccttgaaagtcgatgatatgccacaaagttaaatgcgccatctggcaaaaggcaaattagaacaggttcaaaatttacaactgtctacaacattcaactatttggtcaaaatagaacctaattggcaattttgactttcacaccacacgaatgtaccgagaagtttggtattccccagggcaattttttttttagcgcaaatgacaaacacaataacctaaatttaaagtcaattctagattcataaaggcaatgaatattctaggttctcagaacaatctattctcgtatcagaaaaacagaatgaccataacatcatttggagtcaattaaagttgaatcctgaaggaaaataataaagaaaatatgttcagttcttatgaatcacacatttaataacagcacttttcaaagtcaaagttagttcccattttccaggatgaaaatgactgttagtcattaggtgatcagctattaggtgattaaaacagctattaattaataaattgggggtaagggtctcaaatttggtgcccctcaaaagggtggtaacatgattgactagttttaaaattacataaaagtttcagttatttatgtagataattcagagataatatatctcagaaaatcaggaccaccatctactcttgatgccttaacacagaaaaacagcttagtatggagttcagtctagactggttaggtgcctagcatcccagatcccagtaccttcctggctcttagcatcataaagttaggtaactcagttccctctgaacggaggcaagcgccagccaaaacaacttcagtaagaagacacggtaccttggcgaacaaatcatagctgaatgtaagacaccaatctgcagacactgtagtagcaaggtactgatgaggaactgaaaggccatcttttccttatcctctatctgccatgtgtgattccaagcaagtcttttaactcttgcagtttccaagtcagcaaaaagataattttgcctgtctcacaaagtgctgcaaatattaatgctttcagcacaataaaaatgctatagatttttcaaataaaatatgaacataatatgaacataaaaggcaacttcaatgtgcacttagaaaagattaaattctattaactacatcttcaaaggcagaaaatatttacagcaatatattttagtcagatggaacatcttgttatacacaatacacaatgaagtttactattgtggagatactgaaaagtttttctgtgttaagcttagtaactacaagaagcaaaatatttagaggcagaaaagttggagacaactaaaaaaattaaaaacaagaataaaaccaaaatactatcttcagtcttcttttgctgaaggacctactaactaacgtacaattttgaggagcaagaagcaaatacataatgatcaaaactgctaaacaatatattcaaggggattcaatactacatacaagaccataagagaccttgaacgctttaatgtactgtacaaattgtgacaatgctcatctccacatcacagggctttttacacattgtgtttcatctctaccagcttatttctgacaaacaatacacaaaaatattttcagcaaacatgactcaacgttgaattggaaaagctagacataaaagagccatgtaaaaataagcagtgcctgggacacactattattattacttttatcctttaggagttagcaattctggtagcttgtccaaattctgccaatgaaaaagtactaaaaatactgaacttttaaaccatgtgtctgcttaagataccttaacatataaaagcactgtaagaaacacacctacccaaacccttaaaatgtaacctcaaccttatcacaagccagctttgcggactgcaatctttccccgacttggctaatcagatgctacttgaatgaattaaaatgtatccatcttgaaaagatttttcgctcatagttttaaattacggttttaaatgtccacaacatgtttatctatcgtagaaaacttaatggtcaaaattttaaaatccaaaaaacgagaacttgcgatggatctatgacgtccacttatcttccgaagcaatggaattaactaaaactagataaaataggcacaaatacaacttccaattgtaacatactcatagaagtatttccctaccagactaaataatagtttttttgttttgttttgttttttttacataatcacagttatgctagtccttgataatgttaagctaatcctttgggatcaaacaaccaagtgactttcttatcaaaacaagaactcgggcttttccattacgtgtacacagacttatgaaaaacggtgaaaaaaaaatctagtaactgtctcacagggatccaaggtaagacttggatttcacaaaaatctgcaataattcagtttctttcctcagaatgcttatactcatttaaaaatggaagtctacaagagaacgtagtaacatcctactgcgtgacatgaaatgtagggaacgaatgtttctttttttccttgctgaactcgttagtgccgccaggtcctcaggagaggcccaagggaggtgaagggggcgaccccgaggcgaggaaaaaacgagcgccgccgctcagcccggggagggcatcctccggcctccgtgagtggccggtctctccggccgccagagcacccctctcaacccgggccttggggacggaggacagagataaaatggcctcgaagcggcggaagtgttccccgcaggcgggaaggtagagcggctcacgagagaccggtgccgcaccaggcccgtgtggcctttcgggccctgcccgccccttacccgccgggggcggctgcgcatcagccctcaggccccggaggtcccccgcgtccgctcccgccagccggcccgcgcctacctctccaggcagaagccgcgccggcgccaccggtcgcataggccgaggccgcgctgcttgccctgccgcccgggccccccgggccaccgcgcagccggacagctctgccgccggccccgccgcgctcctagtcccgccgcaacccctgcgctcccctttatttgtgggtctcgctgccacaaaatggcgctgagggaggaaaccaggccccgccgcccggccccgccccgccgcacggctccgctccgccctgccccgccccacagccggtccgaacgcgccgcaggccagcgccactgcctcccgcctcccgcctcccgcctcccgccagcctccccgctccgccatgttcgccttctggcccactcacaggagagtcgcctttcaggcgtggccgcagtcactcgcccgccgccgaaccccgccaggagaggaaaggtgaagggagggaggccgtcggcctagcccgatcggggcctcgaggcacaatggagcagctgctccccggtaacactccccgtcctttcccaggagcctggcgcgagctccgcgggccccggagctcagcaagctcagtaagggaagcggccgaggggaggggcgggccagcgaggtcggaggtcagccccagggcatcacgggaagggaaggtggaagtactcgccggggccacctgcggctgcggggctgcctcgtgcggagggatctgggcgaaggcggcgcgtgattggccgctctgtgttcgtgacgctcatccgtgatgcttccgcgtgtcggaggaccaggtgccacctcaagagagaggccgtgggcggcgagccgcgggcgtttactcttagcagaagctcacctgtaagttttgagaacttagaaaccgatgccttccctctcatcagtcgtgaggcgcagtctcctggccgctgggttcgttcctccttgacatctctggagacgcatcgaggagctattgttctctggcgtcggaggttgcgctgtgtccgcggcgttgagggccccttgctaactggaacacggggaaggcggccctgtgaggtttagtgaactcaatcaaagaggtcctgcaagtggagtagactccctgaagtaagactgccatctggaccgccgagtaatggcggtgttacctggagaacgtgaaacagtctctaaacacttactagaagagcacgtaattcttttgattggtctgtccttagccggctttatcaaacctgttcatccccaaaggagtgtcttgtagtaaggtgatttattaggataagattaaagtacattccagatggtcgtagtatatttccagtgaatcagatcggtctggagaaaatctttgcaactcgtatcacaagagctctcaaaaattgaaaacaaaaagtgcaaaagccaaaggagaaaatggggaaggacatgaacagatgattctcagaaaaaataccgtaatggtctttaaacatagaaagtcgctccacctcacttacaatggaaatacacgttgaaattacctttcctggtgggagtggaaaaatggttcaagttccacggagtacaaaattacttgtgtttattcttataccttgcagttatacttctaaccctaaccttattctgaaggtgcagctccacacatggaaacaataggtatacaaggttattgcagtgctatttgtcatagcaaaagttagggataacccaaatatccgttaatagggaactgattgggaatggtgcatccatacagtagaacacaatgcaaccattaaaaagattcaggaaataatcgtgtgttgctttggaatgagtctcaggttgtattaagtattcacttaaatatttaagtgtagtaagtattcactgtattcaaaagcaaaaataagcatatatgcttttatgtatttacttaaatacataaaaatatatatttatatttaatatgaatatttatgtgtatatgcttattttcggggaggaattggaaggatatcctggaaacttaacatttttagttgcctataaagagtggggggtggagacaagatttctctgtctttgaacttttagttttacatagccaaaaaagtaaataaaaaaggaaacaaagtaaatcctaaggttgaaagcaaattgaaacaaatgaacttaactgttaactaatataactaagatacacagaaaaaataattattctttgggtttttttttttttttttgagacagtctcactgtgttgcccaggctggagtgcagtggtgcaatctcagctcactgcaacctctgtctcctgggttcaagcgattctctcagctcagcctcctgaatagctgggattacaggcatgcgccaccatcccctgctgatttttgtatttttaatagagatgggatttcaccatgttggccaggctggtctggaactcctgacctcaggtgatccgcctgcaggttggcctcccaaagtgctgggattacaggaatgaaccaccaccactggcccctctgagcttttgaacacagtactctagtagtgtatctgtgttgtgatagtgtagtctttccttatatgcaggagattggatttaggaccttctgcgagcatatacagaaatctgcatactaaagtcccggagctgagcatagggaaagttggttctttgtgtaggtgtgttttgcatcccactgtacttctgttttgttttcttccttccttccctttcctttctttttcttttctttttttctttctctccctctcttcttccctcccttcttccctccctccctctcttcccccctcccttccttcccttctcttgcttttctttttttttttcttttttgagaacagggtctgactctgtcgtccaggctggagtgcagtggtacgatcatggctcactacagccttgacttcctgggctcaagcaatcctcccatctcagcctcccgagtagctgggaccacaggcatgtgccagcacatctagctaatttttttctattttcagtagagagctgtgttgcctaggctggtcttgaactcctgggctcaagtgatcctcccacctagcctcccaaaatgctgggattataggtgtgagccaccgtccctcgccccactgtatttttcatctgtgttggggtgaaaaaaatccacatataggtggaccctggcagtccaaaccagtgttgttcaagggtcaactgtgtattctaaggatgaaaaaagtgcacaggagctttcagcttcactgatttatgattaatggtaacattgttactgtggttttaaaactctgtactgtatatggtaggataacataagtattttaatgttactatatacaaagatgtgcagtgtgtgagagaatgagatacaaacacaagatcaaagaagttcagaaaagggccgggtggctgatgcctgtaatcccagcactttgataggccaaagcgggaggatcactagagtccaggagtttgagaccagcctgggcaacatagcaagaccctgtctccattttttaaaaaatttaaaacaatttttaagacgttcattcatccgggggtgggggtggaaactaatataaagaattttaagaagttcagaaaaaaaaagtctgtagtattgagtttaaactggagggctgggtgcagtggcacacacctgtaatcccagtgctttgggaagccaaagtggcttaggagttcaagaccagcctgggcaacacagtgagatcttgtctctacaaaatacaaaataataaaatagccaggggtggtggcctgtgcctatagtcctagctacttgggaggctgaggcgagaggcccaaatgagcccaggagtttaaagttacaatgagctgtgatctcaccagtgcactacagcttgggcaacagaccctatcaaaaagaaaaaaaagtttcaactgcaaaaaaaagtcctagttctgtggactgaaagggcctagaagcactagggtgaccagttgttctagtttgccacaaacagaggggttttctctggatgctggactttcagattaaaactggaacagtcctggctgaaccaggatgtataggcatgggcaccctacagtaacagtgagcacatctgacactgagatcttggtttctaaattccatttcccactaaaaagatccagagctcctttggagaactggctgattccagctctgggacgggaaaggtacaagatgagccaggtatttcgttgtgcctgaatgcagaggaagtgcttagaccaatgaggctatgccaactgtagttaggagaacaaacaacactaatccatagtggtagatagcagatcagtggttggttaggaggggaagagagaaggaattgactggaaaggaaaatgggagaacttttgggggtgatggaaatgttctgtgtcatggttagtgggaatgtatacgtttgtcaaaattcatcaaattgtgtcactgtaaagaatgcattttattgcaaaccaaatgagaaaagcaaagtcgattgagaacttgctgtagcaagggagtcagccaccatcccttatgttttagcagaggttcaaaggcatgcagaggagtgggaaagctttacagtggacaaaaggaaaggtttcacaggtatgcctgattggaagctgttggcatggggaagctggaagctaactacaagttggcatcctatggtcttggttaaaggagcatatttggctttctctggatgggcataagctagaagtgaggacaaaaagtagggaagctgtcaagttttaatcaagtcctggccattttgagctgattgtcatagaagttattatttagcttcctggattgctaccagagatagcagtctgacttcctacaagtctggttgatagcaggtttggctttcaggctgagagtacacttatggtaaataagtggttggtttactgggctagttgttgtaggtaatgggtcagaattctgtttttatgtatattctggccatttaccatttgtattttcagtctctcaaaaataaattttagagacatgggagccagcttgaaggatctcccagggggcaaatttagggcaattttagcgtcaaaaagaaaatgaatacaattgattgcaaatactgaataaataaaagtctactctctagtacagagaagagagaatgagaagagggaaactatttttccatcattggtagtgtctattacaccaatttgatactctgaaaattagttattaaagggagatagcatttaccctgtttgttttttgtttcatttgtttttgtttttaagacagagtcttgctctgtcatccaggctggagtgcagtggcacaaacatggctcactgcagtcttgacctcctgggctcaagtgatcctcgtgcctcgtcagaagctgggactacaggtgcctgccaccatacctggctaagtgtttttgcttgcttttttgtttttttagagatggggtcttgctatgttgcccaggctggtcttgaactcctgggctcaagtgatgctcccacctcaacctcccaaagcgctgggagtacaggcatgggccactgctcccaacctaccctgctttttttttctttttttttttaataaagaatgtggtttatacccagttgatgaggaaaaactcttctttactataggatgccagctaataagtataaaataaaatatagaattagacaataaccatgatgcaaaccttaatgaaataattgactcagacaaggactatcaatggacttcaaaacctttagatgaaagattgctgggaaatgccatcaaagtatcactctacaggctacttacctaattgtaaaagaaattacaggctgggtgtggtggcttacgcctgtaatcccagcactttgggaggccgaggctagcagatcatgaggtcaggagttcaagaccaacctggcaacatagtgaaaccccatctctactaaaaatacaaaaaaaaaaaaaaaaaaaaaaaaggtcagccgcagtggctcatgcctgtaatcctgtaatcccagcactttgggaggccaaggcaggcagatcacctgaggttgggagttcgagaccagcctgaccaacgtggagaaaccccgtctctactaaaaatacaaaattagccgggcatggtggcacatgcctgtaatcccagctactcaggaggctgaggcaggagaattgcttgaacccaggagatggaggttgtggtgagccaagatcgcaccattgcactccagcctgggcaatgagagcaaaactccgtctcaaaaataaataaataaaacggctgggcacggtggctcatgcctgtaatcccagcactttgggaggccgaggcgggcagatcacgaggtcaggagattgagaccatcctggctaacatggtgaaaccccatctctactaaaaatacaaaaaattagccaggcgtggtggtggtcaccagtggtcccagctactcgggaggctgaggcaggagaatggcatgaacccaggaggcagagcttgcagcgagctgagattgtgccattgcactccagcctgggtgacagagcgagactccgtctcaaaaaaaaaattaaaaaatataaataaataaaaattaaataaaaataaaaatacaaaaaaaaaatagtcgggtgcagtggcatgtgcctgtagtcccagctccttgggaggctgaggcaggagaatcacttgaacccaggagcagaggttgcactgagccgagatcgcgccattgcactacagcctgggcgacacaacaagacactgtctcaaaaaaaaaaaaaaaaaaaaaaaaaaaggtaaagaaaatacacctgtatagtggagccatctggtggtcaccatttgaaccaaaccatcaaatttagtatcagtaatagtgggacaacctccagtttacagagaatacaagagaaagggttgtcatgcaaatctgatagtactagcaaagataattattctaaaaaaaaagtcgtaagactataagcaataaatagttattgagcagctgagttaggcatactatagtctcagtttcagtatctaaccagcttcaagtcaccatttcaaatgaaatatcaacgcgtgatgaaagttaacttactaccatccttttcttggggttgcactactgtccaatgggtacctagtgagggcagtactgctaactcctgcacaacacaccgaaatcaactagagctttgctttgccttggtgcagtttttggagaaatgaaaaacagctttcccatacacacacagttatttacatattactgtattaaaaagtacatacaggctgggcacggtggcttacgcctgtaatcccagcactctaggaggccgaggtgggcggatcatttgaggtcaagattcgtgaccagcctggccaacatggtgaaactctgtctttgctaaaaaaatatatatttatatatacacaaaaaaattagccgggcgtggtggcgggcgtctgtaatcccagctactccggaggatgagacaggagattcgcttgaacccgggaggcagaggttgcaatgagctgagatcgtgccactgcactccagcctgggagacggagtgagactctgtcccccccaccaaaaaaaaaaaaaagcaaggctgggcatggtgtctcatgcctgtaatcccaggactttgggagaccgaggcaggcagatcacttgaggtcgggagttcgagaccagcctagccaacatggtgaaaccctgtctctgctaaaaaatacaaaaattagccgggtatggtggcacacatttgtaatccaactacttgggaggctgaggcaggagactctcttgaacccgggaggtggaggttgcagtgagccaagatcgcgtgactgcactccaacctgggggacagaataagactctctcaaaaaaaaaaaagaaaataaaagaaaaaaccataatactgagttagattaagtgaattggccacttctttgccatcagcctaatacttagcctgcaacttttttttttttttttttttgagaaagggtgttgctctgttgcccaggctggagtgaggtagcatgatcttggctcactgcagactccacctcctttgcccaggtgatcctcctgtctcagcctctccagtagctgcgaccacaagcacaagccacctctcccgatctcggctcactgcaacctccgcctccttggttcaagcgattttcccacctcagcagcctgagtagctgggattacaggcacatgccaccgtactcagctagagacatgagtagagacatagtaaagacagagtttcaccatgttggccaggctggtcttgaactcctgacctcgtgatccacctgcctctgcctcccaaagtgctgggattataggcatgggttaccatgccagccgacttctcttatctcttatgtggtgaaaacaggaaaagagagctctatggggtcccttttataagggcactgatctcattcatgaaggccctaccttcatgacctaatccccttccaagggcctcaccacctacctccacattaggggttaagatttcaacatgaattttgggtggacgcaaacattcaatctattgcagaagtacagaggaaaaaaaaaacagtaagtctagcttttgttattggcacccagaaatccagggatcctggagagattatcagagttgttggttaaaaatgttaatgttaatccacgacgctctcaagagctcacgtctggtgtgactatgaccatgtcatgctgtttcaccagttagtacctctgctgagtccattctttctgcctggaatgctctttctactcttctatgccaggttatctcctattcacagttagcaattagcctaagacacattatttatttaccttagtttgtgtcaagcatagacagttgtggttttacagatagggaagccaaaccaaacttcctagcctacttttctttttctaatctagtggattttatactgacttacaagattttactgtgagcagcaatgcaacataacccaatatatctaatctttcagatttagtgaacatttagatttttaaaattataattaaagctataacatttagtcttcattttctctgcagaccacaaagacttctgacattctaagttttttttaaaaaataattcagtagattgttatcataatttttactagactattattaaaatattatttcagaaattcatatgttgatgagatatctgcgttcccatgtatgttgaagcaccattcacaataaccaagataaagactcagcctaagtgtccatcaacagatgaatggataaggaaaatgtggtatatatgaccaggcatggtggcttatacctgtaatcccagcactttaggaggctgggaatttagaagtgggagaattgctcaaggagggtttgagaccagcctgggcaacaaagtgagaccccacctctacaaaaaaataaaaattagccaggcatggtggtgtgcgcctatagtcccagctacttgggaggctgaggtgagaagatttcatgagcccaggagttcaaggctatagtgagctatgaatgcacctctgcattccagcctgggtgacagaggggagagaccctatcccagaaagaaagagaaaaggagagagaaagaaaaagaaaaaaaaattgtgtatgtgtgagtgtatatatatatacacatatacacacacacacacacacacacacacacacatatccatacatatatatgtatgaatactatttagccacaggaggacattatattaagtgaaataagccaagcacagaaagagaagtactgcatgttctcactgataggtgaaagctaaaaaagttgatctcatggaagtagagagtagaatagcggttactagagactggaaagggtaggggtagggaggggacagccagaggttattaacagatacaacagtacagctagatgggaggaataagtgctagtgttctacagcaccattgggtaactataataacaaacaatttattgtatattttcaaatagaagagcagattttgaatattttcagcacaaagaaataatagatatttgaattgatagatgtgccaattaccctgatttgatcactacacattgtatacatgtatggaaatatcacagtgtactccagaatatgtacagttattatgtgtcaaataaaaataataattttatggttaggcacagtggctcatgcctataagcctagaactttgggatactgaggtgggagaagtccttgaacccaggagttcaagaccctcctgggcaacacagcgagaccctgtctctaattctaaaataattatagtaaaaaaataaagatagagttaggttttaaacattctgaactccttggtgggagtaaggagcatctgttggtcaacagaggtaacagaggtatgggtagctcagagtcaattattctcggaaacaggcttgtccagctactggaaaaaaatcccttcattaggaaaaataaaggcaccttttgcatgtaatttccctgtcctgatccctgtaattctttcctagttgcccattcagtacaaataatagcagctttctgaaaaggatttagcatgccagaatgactaggcattgctgtactccttccaacatctgctggggtattgtggcacacactactgggagccatgttcctcctcttgcacaatctaggaacttctaaattgtgtttgagtcatagtatcttcaggccaggagatgaattatggctggtgtaagccagtgtttctcaacaagtgtgctactggaattttggacaagacaatttgtgtgtgtgtgaaaagtatcttgtgcattttaggacatttagcatccccacaccaacccactagatgccaatagcacctctctgtatatgtgacagctgaaagtgtccctttctatattttcaatactgccccctcccgtcatgcccttgatgagaactgctggtctaaggcaagcatggctgtcatggtctttaccacatagtgatggtgctcagtcttcttgcaggcagagttggccagttgagcagttctggctgggatcagaggaaatctctcggggcttctgagaaaaattttccttccggggagaggcacatgaggtgaaatgttttccccctcccttccttgttgtctcttactaggctgtgagaggctgtgctgcttgcacctataggaaacatcttgtgacgatgaggcaacaagttggaaaatgaaagcaggctgctgggaattcagagtcaagaatggaaagtccctgggtccgggatgaccttgttaatcttccagactcaccaagggactgccagttcttgtactttttattaggtaaaacagatatgtccttatatttaaaaccactgttcatcaggattcctgttacccatagccaaacacattctaacttagagaggaagggcatttacatgatcagcaagtgaaataaaatggagaggtgccagcaaaactaggtttttctgtgacactttgctttattgttgttgtttttacattatgatgtccatagcccttgtttcacaataaagcaaaaatttaaaagtcattattcatttccagaaaaccaaacttttataagacaaaaagctaactacaataaaaatataagggtcttgaaggattttattttcagaactttttttttttttttttccttgagacagggtctagctctgttgcccaggctggagaccagtggtgtcatctcagttcactgcagcctgcacctcctgggctcaagcgatactcccacctcagccccccaggtagctgggactacaggtgtgaactaccatacccagctaatttttgcattttttatggagacggagtctcaccatgttggccaggctggtctcaaactcctgggctcaagtgattctcccaccttgacctcccaaagtgttaagattacaggcgtgagccaccatgcctggcctatattcagaacttttcaaaatactattctgtttgcctctgttgcttgctaatagtgtttaaccttatggatgcaacggtaagatcctgtttggtcaaaccttcagtcaaatctcttcagtttttaaaaggacggttttttgttccccacaaattaaagacccactaggacaggagacagtccattcaaaaactatgtgactgttgacaaactgtaaatccattcttctgccagaggagagcactgggccttaagcaatggttctactgttgaccacactgacttcctgttagacatgtttttgttgctcttccctgtttttcttaacctgtaaatagttttctctatcccactcatttgggtcccagtgccactggccaatccaggtcttcagcttttcttgtcgactaacagtggccccccaattggtcctctgccacccatctttgcttcccatccaaactctctcctacacaacaagccctttctaaacacaagtctgggaaatttccactcctgggaaaatggactagacatacttttccatgttcctctcaccaagtatggctaaaaatcctgaatattatatgtaaaacaagcagaagaagactgaaaggcaaactggctatggacttcaggacccaaggactgacacaggaatgactccctgtgtttcatttttgcctcatatatcccagaagccagcaatctgtacacatcaacaagcacagacaaaaacagccaccagcaaaagcctcttatgtataactaaaggtccaagaaaggaggcagtctaccaagacagaaaacctttagacagtaactgctctactccagccagacaacagagaagaatctgcagcctacccccatccactcaagcaaaggcttctgatgaaaatgccagtgggctgtgatgtgattagttaggcaggacaccagggtaggcttatcataatctgggcacacagaattgcagtcatttggcacaccttttcaacaaagtgaaaaacaggaattgctttatagtaccgtgggaaagagtaccgcctggcgatgaaacgagcaaaacatctagaggctgtgctgctgagcctgctggtggaagtcaaatcagtgttggttcttaaaagttcactacccaggccctgcctggggagtgaagtagggagtgtacagtcaggagaagggactgatggaatgtgcgggtctgttcccgatggaagctaggcttatcttcccttggagggaagaatccgtatgtaatatgtcagccagtgtgggactcagggaagtccaaggtcattgggtttctggagggaaaaaagaatagaggaaaaggtataggcagagatgatgtttctttggtcctcacaacccgacgtctagggaggtgagggcctgtattagtcttatgtgacagatgggacagcagaggcacagagaagtcagatggcagcagagattagaggtaaagccggtgtgctcatgtgatcacttgcttatgtgagcagaagtagttctgcttgtcatcttgctatagcccatttgaaggcagaaggaggataattgcccactacaccaaaattgcattccgccaaacttgccaccaagagctcaacagtcgccacgatgctgagcacggaaggcagggaggggttcgtggtgaaggtccagggcctatcctggtcctgctcagctgatgaagtgatgcacttctctgattgcaaaatacaaaatggcacatcaggtatttgtttcatctacaccggagaaggcagaccaagtggtgaagcatttgttgaacttgaatctgcagatgaagcgaaattggctttaaagacagagaaaccatgggacacagatacgttgaagtattcaagtctaatagtgttgaaatggattgggtatcgaagcacacaggtctgaatagtcctgatactgccaacgatggcttcgtctggcttagaggacttccatttggctgtccaaggaagagattgttcatttcttttcagggttggaaattgtgccaaatgggataacactgtgagtggactttcagggcagaagcacaggggaagcctttgtgcagttggcttcgcaggagatagctgagacggcattgaagaaacacagggaaagaatagggcacaggtacattgaaatcttctagaatagccaagctgaagttcatacctactatgatccctctcagaagctcatggctgtgcagtggccaggtcccagtgataggccaggggctggctgaggtgtaatagcattggcagaggagctgggtttgaaaagatgaggcagggtccctatggtggagggtatagaggctatgatgactatcgtggctgtaatgatggatatggctttaggtctgatagatttggaaaagaccgcaattactgtttttcaggaatgtctgatcatagatacggagatagtgggtccagtttccagagcaccacagggcactgtgtacacacgaggggtttaccttacagagccactaagaatgttataatttctattcacctcttaacctcatgagagtacatattgaaattggacacgatgacagagtttactggtagggcagatgttgagtttgctgctcacgaagatgcagtggcagctatggcaaaagacaaagctaatatgcagcacaggtacagggagacctttttaaatgctataggaacaagtaggggggtttatgaacacacctatgtagaacttttcttgaatctacagcaggggcaagtggtggtgcttatggtaggcaaatgatgggagagatgggcttacccaaccagtctagttatgcagctgagtggtggttgtggaggtggttatggtggtctgagtagtgtgagtggtggttatggaggtggttatggaggtcagagcagctgagtcgtggttatggaggtggttagggtgatcagagcattgtgagtggtggttatggaggtggttatggaggtcagagcagctgagtggtcgttgtggaggcggttagggtgatcagagtagtgtgagtggtggttatggaggtggttatggtgatcagagcagtgtgagtggtggttatggaggtggttatggaggtcagagcagctgagtggtggttatggaggtggttatggaggtctgagcagtgtgagtggtggttatggaggtggttatggtgatcagagcagtgtgagtggtggttatggaggtggttatggaggtcagagcagctgagtggtggttatggaggtggttagggtgatcagagcagtgtgagtggtggttatggaggtggttatggtgatcagagcaatgtgagtggtggttatggaggtggttagggtgatcagagcaatgtgagtggtggttatggaggtggttatggtgatcagagcaatgtgggtggtggttgtggaggtggttatggtggtcagagcagctgagtggtggttatggaggtggttatggaggtctgagcagctgagtggtggttatggaggtggttatggaggtctgagcagccgagtggtggttatggaggtggttatggaggtctgagcagtgtgagtggtggttatggaggtggttatggaggtctgagcagtgtgagtggtggttatggaggtggttatggtgatcagagcaatgtgagtggtggttgtggaggtggttatggtgatcagagcaatgtgagtggtggttatggagatcagagcagtgtgactggtggttatggaggtggttatggtggtcagagcagctgagtggtggttatggaggtggttatggtgatcagagcaatgtgagtggtggttatggaggtggttatggtgatcagagcaatgtgagtggtggttgtggaggtggttatggtgatcagagcagtgtgagtggtggttatggaggtggttatggtgatcagagcaatgtgagtggtggtattggaggtggttatggtggtcagagcagctgagtggtggttatggaggtggttatggtggtcagagcagtgtgagtggtggttgtggaggtggttatggtgatcagagcaatgtgagtggtggttatggaggtggttatggtgatcagagcaatgtgagtggtggttgtggaggtggttatggtgatcagagcaatgtgagtggtggttatggaggtggttatggtgatcagagcaatgtgagtggtggttgtggaggcggttatggtgatcagagctgttgagtggtggttatggaggtggttatggaggtcagagcagtgtgagtggtggttatggaggtggttatggaggtcagagcagtgtgagtggtggttatggaggtggttatggtgatcagagcaatgtgagtggtggttgtggaggtggttatggtgatcagagcaatgtgagtggtggttgtggaggtggttatggtgatcagagcaatgtgagtggtggttatggaggtggttatggtgatcagagcaatgtgagtggtggttatggaggtggttatggtgatcagagcaatgtgagtggtggttgtggaggcggttatggtgatcagagctgttgagtggtggttatggaggtggttatggaggtcagagcagtgtgagtggtggttatggaggtggttatggaggtcagagcagtgtgagtggtggttatggaggtggttatggtgatcagagcaatgtaagtggtggttgtcgaggcggttatggaggtcagagcagctgagtggtggttatgaggtggttatggtgatcagagcaatgtgagtggtggttgtggaggcggttatggaggtcagagcagctgagtggtggttatggaggtcagagcagtatgagtggtggttatggtggtcagagcagtgtgactggtggttatggaggtggttagggtgatcagagcagtatgaggggatatgaccacgttctggaggaaaactccagtgactgtcagtcaaagcttggttaggtagagaaggagcactaaagagctactccagatataaaagcagtgcacttatgggagttgaatagaatgggagggatgtctagtatatcccgtataatgggtaaatgagaaatataatttattctgatcactcttggtcagcttctctgtcgtctttctttttcctctttttttgagacagagtctaactctgtcgccaggttggagtgcagtggcacgatcttggctcactgcaactttgcctcccaggttcaagtgatttctcctgcctcagcctcccagtagctgggactataggcacgtgccaccacgcccagctaatttttgtattttatatatatatatatatatgtatttatactttaagttctagggtacatgtgcacaacgaacgtgcaggtttgttacatatgtatgcatgtgccatgttggtgtactacacccattaactcgacatttacattaggtatatctcctaatgctatcccgcccccctccccccaccccacaacaggccccagtgtgtgatgttcctcttcctgtgtccaagttcaattgttcaattcccacctatgagtgagaacatgtggtgtttggttttttgtccttgcgatagtttgctgagaatgatggtttccagcgtcatccatgtccctacaaaggacatgaactcatcattttttatgactgcatagtattccatggtgtatatatgccacattttcttaatccagtctatcattgttggacatttgggttggctccaggtctttgctattgtgagtagtgccgcaataaacatacgtgtgaatgtgtctttatagcaacatgatttatattcctttgggtatatacctagtaatgggatggctgggtcaaatggtatttctagttctagatccctgaggaatcgccacactgtcttccacaatggttgaactagtttacagtcccaccaacagtgtaaaagtgttcctatttctccacatcctctccagcacctgttgtttcctgactttttaatgattgccattcttactgatgtgagatgatatctcattgtgcttttgatttgcatttctctgatggccagtgatggtgagcattttttcatgtgtctgttggatgcataaatgtcttcttttggggagtgtctgttcatatccgttgcccactttttgatggggttgtttgtttttttcttgtaaatttgtttgagttctttgtagattctggatattagccctttgtcagatgagtagattgcaaaaattttctcccattttgtaggttgcctgttcagtctaatggtagttttttttgctgtgcagaagctctttaggttaattagatcccatctgtcaattttggcttttgttgccattgcttttggtgttttagtcatgaagtccttgcccatgcctatgtcctgaatggtattgcttaggttttcttctagggtttttatggttttgggtctaacatttaagtctttaatccatcttgaattaatttttgtataaggtgtaaggaagggttccagtttcagctttctacatatggctagccagttttcccagcaccatttattaaatagggaatcctttccccattgcttgtttttgtcaggtttctcaaagatcagatagttgtagatgtgtggtattatttctgagggctctgttctgttccattggtctatatctctgttttggtaccagtactatgctgttttggttactgtagtcttgtagtatagtttgaagtcagcgtgatgcctccagctttgttcttttggcttaggattgacttggcaatgtgggctcttttttggttccatgtgaactttaaagtagttttttccaattctgtgaagaaagtcattggtagcttgatggggatggcattgaatgtagaaattaccttgggcagtatagccattttcacgatattgattcttcccatccatgaccatggaatgttcttcaatttgtttgtgtcctcttttatttcgttgagcagtggtttgtagttctccttgaagaggtccttcacataccttgtaagttggattcctaggtattttattctctttgaagcaattgtgaatgggagttcactcatgattttgttctccgtttgtctgttattgatgtataagaatgctagtgatttttgcatattgattttgtatcctgagactttgccgaagttgcttatcagcttaaggagattttgggctgagatgatggggttttctagatacacaatcgtgtcatctgcaaacagggacaatttgacttcctcttttcctaattgaataccctttatttctttctcctgcctgatggccctggccagaacttccaacactatgttgaataggagtggtgagagagggcatccctgtcttgtgccagttttcaaagggaatgcttccaatttttgcccattcagtatgatattgggtgtgggtttgtcataaatagctcttattattttgagatacgtcccatcaatacctaatttattgagagtttttagcatgaagggctgttgaattttgtccaaggccttttctgcatctgttgagataatcatgtggtttttgtctttggttctgtttatatgctggattacatttattggtttgcgtatgttgaaccagccttgcatcccagggatgacgcccccttgatcacggtggataaacttttggatgtgctgctggattcagtttgccaggattttattgaggatttttgcatcaatgttcatcagggatattggtctaaaattctcttttttttgttgtgtctctgccaggctttggtatcaggatgatgctggcctcataaaatgagttagggaggattccctctttttctattgattggaatagtttcagaaggaatggtaccagctcctccttgtacctctggtagaatttggctgtgaatccgtctagtcctggactttttttggttggtaagctattaattattgcctcaatttcagagcctgttattggtctattcagagattcaacttctttgtggtttagtcttgggagggtgtatgtgtcctggaacttatccatttcttctagattttctagtttatttgtgtagaggtgtttatagtattctctgatggtagtttgtatttctgtgggatcggtggtgatatctcctttaacattttttattgcatctatttgattcttctctcttttcttttttagtagtcttgctagtggtctatcaattgtgatctttccagaaaaccagcttctggattcattgatttttttgaagggttttttgtgtctctgtctccttcagttctgctctgatcttagttatttcttgccttctgctagtttttgaatatgtttgctcttgcttctctagttcttttaattgtgatgttagggtatcaattttagatctttcctgctttctcttgtgggcatttagtgctataaatttctctctacacactgctttaaatgtgtcccagagattctggtatgttgtgtctttgttctcgttggtttcaaagaacatctttatttctgtcttcatttcattatgtacccagtagtcattcaggagcaggttgttcagtttccatgaagttgagtggttttgagtgagtttcttaatcctgagttctagtttgattgcactgtggtttgagagacagtttgttataatttctgttcttttacatttgctgaggagtgctttacttccaactatgtggtcagttttggaataggtgcgatgtggtgctgagaagaatgtatattctgttgatttggggtggagagttctgtaggtgtctattaggtccgcttggtgcagagctgaattcaattcctggatatccttgttaactttctgtctcgttgatctgtctaatgttgacagtggggtgttaaagtctcccattattattgtgtgggagtctaagtctctttgtaggtctctaaggacttggtttatgaatctgggtgctcctgtattgggtgcatatatatttaggatagttagctcttcttgttgaattgatccctttaccattatgtaatggccttctttgtctcttttgatctttgttggtttaaagtctgttttatcagagactaggattgcaatgcctgcctttttttgtattccacttgctgggtagatcttcctccatccctttattttgagcctatgtgtgtctctgcatgtgagatgggtttcctgaatacagcagactgatgggtcttgactctttatccaatttgccagtctgtgtcttttaattggagcatttagcccatttacatttaaggttaatattattatgtgtgaatttgatcctgtcactaggatgttcgctggttattttgctcattagttgatgcagtttcttcctggcatcgatggtctttacaatttggcatgtttttgcagtggctggtaccagttgttcctttctatgtttagtgcttccttcaggagctcttgtagggcaggcctggtggtgacaaaatctctcagcatttgcttgtttgtaaaggattttatttctccttcacttatgaagcttagtttggctggatatgaaattctgggttgaaaattcttttctttaaaaacgttgaatattggcccccactctcttctggcttgtagagtttctgctgagagatcagctgttagtctgatgggcttccctttgtgggtaacccgacctttctctctggctgcccttaacattttttccttcatttcaactttggtgaatctgacaattatgtgtcttggagttgctcttcttgaggagtatctttgtggcattctctgtatttcctgaatttgaatgttggcctgccttgctaggttggggaagttctcctggataatatcctgcagagtgttttccagcttggttccattctccctgtcactttcaggtacaccaatcagacgtagatttggtcttttcacatagtcccatatttcttggaggctttgtttctttttactcttttttctcttaacttctcttcttgcttcatttcattcatttgatcttcaatcactgataccctttcttccagttgatcgaatcggctactgaagcttgtgcattcgtcacgtagttcttgtgccatggttttcagctccatcaggtcctttaaggacttctctgcattagttattctagttagccattcgtctaatcttttttcatggtttttaacttctttgcgatgggttcagacttccttctttagctcggagaagtttgatcgtctgaagccttcttctctcaactcgtcaaagtcattctctgtccagctttgttccattgctggtgaggagctgtgttcctttggagatggagaggtgctctgatttttagaattttcagcttttctgctctgttttttccccatctttgtggttttatctacctttgttctttgatgacggtgacgtacaggtagggttttggagtggatgtcctttctgtttgttggttttctttctaacaggaccctcagctgcaggtctgttggagtttgctggaggtccactccagaccctgtttgcctgggaatcagcagtggaggctgcagaacagcgaatattgctgaacagcaaatgttgctgcctgatcgttcctctggaggtttcctctcagaggggtacctggccatgtgaggtgtcagtctgcccctactggggggtgcctcccagttaggctactcaggggtcagggacccactcgaggacgtggtctgtctgttgtcagatctcaaactctgtgctgggagaaccactgctctcttcaaagctgtcagacagggacatttaagtctgcagaggtttctgctgccttttgttcagctatgccctgcccccagaggtggagtctacagaggcaggcaggcctccttgagctgcagtgggctccatccagtccgagcttcctggctgctttgtttacctgctcaagcctcggcaatggcaggcgcccctcccctagcctcactgctgccttggagttcgatctcaggctgctgtgctagcagtgagcaaggctccatgggcgtggcaccctctgagccaggcacaggatataatctcctggtgtgctgtttgctaagaccattggaaaagcgcagtattagggtgggagtgaaccgattttccaggtgccgtctgtcacagctttgcttggctatgaaagtgaattccctgatcccttgcgcttcccaggtgaggcgatgcctggccctgcttcggctcacactcagtgctctgcacccactgtcctccacccactgtctgacaagccccagtgagatgaacccagtacctcagttggaaatgcagaaatcacccgtcttctgcatcgctaatgctgggagccgtagactggagctattcctatttggccatcttggatccgcctctcctaatttttgtatttttattagagatggggtttcaccgtgttggccaggatgatcttgatctcttgacctcatgatctgcatgcctcagcttcccaaagtgctgggattacaggcgtgagccaccatgcccagcctttcctttttaaagaaaacaaaagtttaacagttttgcattacaggcttgtgtcacatgcttactgtaacagtggaagattattttaaaacttcaagctcagtaattttgaacactgaaacattcatctaggacataacaaagttcagtattgatcataactattaaaacaattttcagctttcttcaagttagttatgttgtaggagtgtatctaagcagtaagcatatttaggttgatgcagtttcacttgtgttaaatgttgctcttgtaccccataaatacattgaaaagtttggatgctcatcaaatataggggctgtgtatgcgattcaaagtgaaaacatttggcatgtttgttaattctagctttttggtttaatatcctgtaaggcatgtgagtgtacacttgagtgtatacttttacttttttttaacatatgggacaattttaagatgtaatactaatactttaggagtttcgtcatgtcatttgtatggaattctgaggctttggtttaaatctttccttgtgatttccatttagaagtattgtactaagtgaaacttgttaaatcttcctttaaaaaaaaaaaaagaggtaaagcctcaacttccatgtagtaagctgctttctttgtccactccttgaaacacacacaacagaatttccatacatacatacaaaaacagaagcccttcactcttgtcgcccaggctggagtgcaatggcgcaatcttggcccactgcaacctccatctcctgggttcaagctattctcctgcctcagcctcccaagtagctgggattacaggcatgcgccaccacgcctggctaattttgtattttttgtagagacggggtctctccatgttggtcaggctggtctcgaactcccaacctcaggtgatctgcccacctcggccttcaaaagtgctgggattacaggcgtgagccaccatgcctggccggaagccattttttttaaagatgaggtttcactgttggccagactggagtgcagtggtgcaatcagagctcactgcagcctcgaacccctgggattaagcagtcctaccttagcctcctgagtagctgggactataggcaaataccacaacacctggcttttttttttttttttttttttttcgagatagggtcttgctctgtcgcccaggctggagtgcagtggtgccatcacaacatactgcatcctctgccttctgggctcaagtgatcctcccacctcagcctctcagtaactgggactacaggcgcacaccaccatgcctggcttttttttctttctttctttctttctttttttttttttttttttttttttggagagatagagcttccctgtattgctgctggctgaggttttaaaaaattgtttataggctgggcagggtggctcacacctgtattcccagcacttcaggaggccgcggaggtgggcagattgtctgaggttgggaggttgagaccagcctggtcatcatggtgaaaccccatctacttaaaatacaaaaattagctgggtgtggcagtgcacgtctgtagtcccagctcctagggaggctgaggcacaagaatcacttcaacctgggaggcggaggttacagtgagctgagattgcaccactgcactccagcctgggtgatagagtgagactcagtctcaagaaaaaaaaaaaaaaaattttatacagacagggtcttgctttgctgcccaggctggtcttgaactcctggcttcaagggatcctcccgcctcagcctcccaaagcaccgggattacaggtgttagccactacaaatgcgtagcagcataaaggcacaactaactacagagaatgtaatctaaagtatgtttaagctcatcagatttatatgataaagtaaggtcccttatttggggcatccatattttatgcccataaaccattgaactgaataacaagtctctttctcagtaggaaaaaccttagatacaaggcagggagattttgttcttgttctctaggaaaaagtgagagaaaagcagctgtgtatagcactttctaactgtaaaggtcacacttgggctgacggggtgggtgatcctctggcaagaaggggaatgagcacaggttctctcctaaaatccccactgaaatgactcatagaatatacaaattgctggggaaaagtccacattcaagctggaaatgttgggtaccattcaaataccaaaaatgtgggagattttgagattctaccatagcactgatgtgtgactattaacagtaacaatgactcatggatgagatcatgaagtgatattcctttattgcccaataggtcattaaatttgcttcatgggcttgtttttccttcgtccctggatcaaatgctggtcccatgacttttttttttttttttttttgaaacagggtctcactctgtcaccaggctggagtgcagtggcatgatcgtggctcactgcaacctcgaactcctgggctcaggtgatcctcgggcctcagcctcccaagtagctgggactataggcatgtgctatcacgcccagcttggtcccgtgaccttttaaaaaatatatgttctttagtaataaaaagtcttataatcactttaagttagaacacaggctcaattcactatccaaaatgctcccatgtgagaagcaaaactctgaaagtgatttaaagtcaaaacttcatcacaggcctctagcaggccagcagcctacagagggagaaagatgttggcagctggcaggtgccttctctagcgtcttgccttctgctgctgctgctcatctttgagcatgctaaccatggtttctcaaatctccagggattggcctggagaggaagcaggtgtggggttatatttatattgctcacagtggtggcatgtgggtggaatacagggaaatcttacatattgtcttgcctgacagttgctttaagtggactccttctcatggttttggagaccaccccatcactgagaatttgtgtctcctagagttcagtctaaaagccgagatcctacattgtgttccagggaagcttaagaaaattaggtctctgcttgatttggaaagcttagactgaacctaaatgaaaatcaggtcagtaaaaagtcagagtttaacaaagatagatgttatgtcccagagaccagacatttaagcattactttcaaagtgcactcagagagatatttgttcttcatttagtacttagagactaagtcttatccatgccatcaaaaaaatgggagttggaaaacatgccacacatgttaacaatgcattgattttttttttttttttttgagacagagtctcgcacgtcaccaagactggagtgcagtgacgcaatcttggcttactgcaagctctgcctcctgggttcatgccattctcctgcctcagcctcccgagtagctgggactacaggcgcctgccaccacacccagctaattttttgtatttttagtggagatggggttttgctgtgtcagccaggatggtctcgatcgcctgaccttgtgatccacccacctcggcctcccaaagtgctcggattacaggcgtgagccaccgcgcctggccaacaatgcattttaacttaaaccatgtaaatgaattcagatgaagaaccagaaaattactggagctactgcatcaccacactagtaatgtgttgtctctaatttccattaattctctaaagtggagtggcatttaaagacacctggaaaccaatctgatcccttaaatgtttaataattgtcccactcttaaatatgttttgtccacatctaactgaacagtgatcatttttagtggctcacctctagtgtaccaacatatagctgactagttcctcaaactaaatatctttagcatgaaaatgaagttttattttatgcgattttatctaatttctcaccagagggtaaatgcagatgtaagctggcacgagaggagggtgatgcaggccaagatggattgagtcctgggagttgcctgagatgggacataggttcccagaaatactgtgatatcaatactgttctcagtggaccacaatctggcatggacctgggtggtatgcgaggccactcctcctgtgtacctattttggctgctccgagtagatgtacagtgtggagtgcagcccctgggttgtgctggcccagagattcagccagccaagatccttatgcttgctcacagccctcagtggtctgggctactctttagtagcttgagtagcccttgagagtcattcttggaactgtgcacctgaaatcaatcttactccatgacaaatcctgggatatgaactagaagttggcagtttaataatgacagatcccacccttacatagaatgcagtgaccatgtttgtttttttttttctcgtggagtagtaatggggaagaggtggtgtccatttccataaaggaggcaggatgttgcaggaagtcctcatgaaaggatcttatggagggctctgccggactctcaatatgggacaacccttctcttttggcctcctgggtccccagcaagtctgagtctttcactagactaggttgggaagaatgagctgggccattgtgaagggaaactccaggaagctgggtcttcactgaggctacaaagcaaatgccatctaaggggcagatggaccaaggtcagggcatagaagcaatgtcaagctttaggtccaagagtgatgaccagagtcgtgtaagagatgggacagcaggccaatcaggatttgaggagatagggataagttgggaagttgtgtagggacagaaggaggaagaaagtttcaaatcttgggctccaattagataaggctgggcccaattcttttgggtgtgaaaaatgtgggagagggagtggcagctgtttaaaggcacggagctacacaggtttaacagcaatacacttgacccttgaacaacatgggtttgaactgcatgggtccacttctatgtagattttcttctgcctccacccccgccccccaccccccagacagcaagatcaacctctcttcctcagcctactcaccataaagatgaggaggatgaagacctttatgatgatccacttctgcttaatgaatagtaaatataatttctcttccttgattttcttatttttttcttttctctagcttactttaagaacacaatattcataaaaaatatgtgctaatcaactttgttattgtcttctctgtgatgtacaaactttatgttattgccggtcaacagcaggctattagtggttaagtttttggggagtcaaaagttacagtcagatttcttttcttgtttttttttttttctaaatgttttattggattttttttttttttttttttttttttgagacaaggtctcactctgttacccaggcaggagtgcagtggcgcgatctcagctcactgcaacctttgcctcccaggctcaagcgattctcctgcctcagtctcctgagtaactgggactgcaggtgcttgccaccatgcctggctaattttttgtttgttttgagatggagtctcgctctgttccccagactggagtgcagagtgcagtggcaggatctcagctcactgcagtctccacctcctgggttcaagtgttttttttgttttgttttttgtttgtttgtttgtttgtttttgacactgagtcccactctgtcgcccaggctggagtgcagtggcgagatctcagctcactgcagctgccgcctcccgggttcaagcgattcttctgcctcagcctcccaagtagctgggactacaggtgcgtgccaccacgcctagctaatttttgtatttttagtaaagacagagtttcaccatattggccaggctggtctccaattcctgacctcatgatccacctgcctcagcctcccaaagtcctgggattataggcgtgagccactgggccctgccaatttttgtatttttagtagagatggggtttcaccatgttggccaggctgatctcgatttcccgacctcagatgatccgcccacctcggcctcccaaagtgttgggattacaggcgtgagccatggtgctgggcatatacgcagatttctgactgtgaagggaccagcacccctgacactgcatcattcaggggtcaactgtacattcatatcccccttactacctactagctctatgtgtgaccttggtcaagtcactgtctttgcttacagcaggaataaagcatttgacttagtagctagcaacatggaggatctgctcaatgatgccgactccctttgccctttatggacgtaatcaactcatgattacctgcgacacatgcccactttatccctttgtttaacagaacacttttgttctgaaccaagctcctcctttcctttccagtagttaatgtgttctttgaggatgcaatctaatcgtaattttgcccgaagtggggaaaaaaattaagctcacattgaaaccttaatatagctctataatcattttctcttttagcctagatcacttcattttggcaatttaagtactacttttggtcctattaacaataccactcttgcaaaggacaggttacaaccaattctcagattcctgcctggataagatttgtgaccccaaattttaaaaaagcagaaaaaaaccccacaaaccacaggcaggaagaaagaaaaacaagagaatgtagctaaggtaattccattaatgatcagtttatgtcaaagcatgtggaaataatgccttataggaggatatttagcaacaacgatttttttaaactcattttctcctgtaggtacagaattgcaagttttttctgacttcaaatgtgtatagctgactgcgtgtgtgtgtgtgtgtgtgtgtgtgtgtgtgtgtgtgtgtgtgtgtcagggtctccttctcttgcccagactggagtaaggtgacataatcatagctcattgcagccatgaactcttgggctcaagtgatcctcctgccttcagcctcctggcgtagctaggactgcaggcacatgctaccacacccagctactgttttttggtagagacagagtcttgctatgttgcctaagctggtctcaaactcctggcctcaagcaatcttcccacctcagcctctcaaagagctgggattacaagcatgaaccactgcacctggccccatacctgactacatttctcagcttcctttgtggctaggctgtgctaggtagccttgtacctaaattttgaccagtgagcagcaagtggaatttgttggatgaatctaccacaaaggatccttacaatggagatagtggggccaggcatggtggctcatgcctgtaatcccagcactttgggaggctgaggcaggcagatcacttcagtctaggagttcgagaccagcctggccaacatggtgaaaccccatctccactaaaaatacaaaaattagccaggcatggtggcacgcacctgtaatcccagctactcaggaggctaaggcaggagaatcacttgaactcaggaggtggaggttgcagtgagccgagatcgcaccactgcactccagcccagcaacaaagcaagactcttgattcggaaagaaaaaataaaaaaaggttgggggagacagtgggagcccagacttttgtccttccccttgcctagaagggagatgaggttgctggtgctgtggaagctattatggaccatgaggcagctttgaagacagaaagcctgcatccttgatgactcaatggaatttcatcccaacccaggactgactgccccagatctttgttacatgagggaatacactcttctgtgtttaagaaactgtggttggatctgttactggaatatgaatgcagttaataactggctcaaaatgacttcatctcaacccacattggttgcttcttccaaacaatatataggtctgtactgtggtgggtctcaggatggctgtgatgtagccttaggaagtttatctatgggaaatccatattcatggtgtcctgatgttgcagaggacatcctgagctggctggagtaacttgggacacaggtcaatcgactgtaatctaacttctgaggccattcagtaccctctacagtggccacctaaaaaaaaggcagccaggtgtggtggctcaagcctatatagatcccagaactttggaaggctgaggtgggaggatcacttgagccaaggagtttgaggccagcctgggcaacatgaagaaactctgtttctacaaaaaataaaaaaaattagccaggcatggtggtatgcacctgtagttccagcttcttgggaggctgaggtggaagaatgacatgagcccagcaagtcgctgcaatcagccgtgatcacgccgctgcactccagcctgggcgacaaaaagaaaaagaaaacggagcctgttcactgggtgtggtagacaaggtaaacttttctttacctcccatatcccacaaccttggatgtgctcacagtcatggtagtgttttgtaatgatgtagctgatgacaggtgtgatgttggagattcttctacctgactgctgctatcagtcctaccagcccccaacgtttggtgcttgttctaaagggcatgtcctaggagtcgctttaaactctcaaagtatcactctctatacaaacaagaagtgcaagtaagtagcctgagctcagcctcccaataggaatatttcattatcactagatcaagtctttccattacaatgactgatctgtctctgaatcctgtggattcatccttcaaaatgcccttttcttccagttctcatagctagtgccctaaaagtgacctgcagtacctcctgctgagacgaatgtaccagcttcctaactagcctgcactcccttcatccccccaagtcagtgccagaccaccttgcctgaaaaaccactttcagtgtgtctcacctcagcagaaatgtttctcagcttccaattaacaatcacatcaaacccctgctcttgtctgcgttttaagggtatctataggccgggcgccgtggctcctacctgtaatcccagcactttggaaggccgaggcgggcagatcacttgaggtcaggcgttcgagaccatcctgaccaacatagtgaaaccccgtctctaccaaaaatacaaaaaaaaaaaaaatagtggggcgtggaggtgcacgcctgtaattccagctactcgggaggctgaggcaggagaatcgcttgaacccgggaggcagaggttccagtgagccgacatcgcgacacagtactccagcctgagcgacagagcgaggctgtgtctcaaaaataaataaataataaattaaaaaaataagagtatctataacctggtcccagcctgaatttcctttttcaccccaacacgtagccctagttacattcttctgacgtctgtaaacaagcccagcccttcctgttgtgaagccaagttcaggtggttcctcttcgcctgactgttttcccattccacttaccggaagcctagtcatccttcggagggctgtacgggggttgcaagaagcaacggaaacggttcagcacctgctaccttccatcatattcttttcaataaaggggcaactcccgccaatggcagtgtagatttcctaacctctacacatggaagattcacaccattcaggattgttgtttaactgttgagagagcacttgatacttaacagcttactaggctacaagacagcgcaggaaagaatcctctgttgtccttttatgttatcctgaacagttggttcacagagttactgtaaacacacaaaacatgactgccagggcttagtagtgaggaaggtgggaactagtcctgactcagttaactgtgcccaggagaagctgcttaacctcaaaggatttcactattactagaatcaataataccaaccctaggggtaaaaataaagataaatgtgtgcaaatcctgcctgcagtctcgggcacgtcgtgggtgtccaagaactgttcttaggcagccggtggggacaaagtctgtgtgcctcctgtcctggaataggtcccaaggtcggcttacttgcaaagcaagggtacggcgcaagagtactgaatacgggttggaagggcgctggctctaccctcagctcataggccggctgggcggcgctgaccagcagctaggccccgtcttccctaggaacggccacgggggccctgggagggtatgaatgtctttttgcagtgaggcctctggaccccgcggccccccggcagcgcaaccaaaactcaggggcaggcgccgcagccgcctagtgcagccagatccccgccggcaccctcaggggcggagccggaggcagggccttcgggccgtaccaactccacgggggcaggggccgcctcccttcggccgcgcgccactcaagtacggcagacaggcagcgaggttgccgaggccgaggctagcctgcagcctcctttctcccgtgccctgggcgcggggtgtacggcaagcgcgggcgggcgggacaggcacgcagggcacccccggggttgggcgcggcgggcgcggggcggggcccgcggggggggggggcggggcggcggtgcccttgcggcgcagctggggtcgcggccctgctccccgcgctttcttaaggcccgcgggcggcgcaggagcggcactcgtggctgtggtggcttcggcagcggcttcagcagatcggcggcatcagcggtagcaccagcactagcagcatgttgagccgggcagtgtgcgggtgagaagaaaggggacccggtcacggccccaagggcgaaggggctcgcggcgggcagggcctccgcggcaatggcgacagtggccgcaccgggcctggcgggaccggggcacctgcaggcggttctcccgggagtgcccggcgcggcggctggagcggggatccgcagggaggggacgcggggactcgggggacgccgcgcgctgccgttcctcggcagcccagcctgcgtagacggtcccgcggcgctgactgaccgggctgtgctttctcgtcttcagcaccagcaggcagctggctccggttttggggtatctgggctccaggcagaagcacagcctccccgacctgccctacgactacggcgccctggaacctcacatcaacgcgcagatcatgcagctgcaccacagcaagcaccacgcggcctacgtgaacaacctgaacgtcaccgaggagaagtaccaggaggcgttggccaagggtaggttccaggctgagcggcgggaggcagtccccggcagaggcgaccccagggagccaggccccatacggacgggcctctccgtggaggagaactcgcttcgtatttgtaccggttccgagttttccaggcacgatagtctctcttttaaacacatggtctacctcattgtagaaggagtgcctcgatgggtttgaacacacttctgtcatctcagggaacttggggtcctgcgaaggagcttgccttactgttgtgagccacattccgttacacatattgccagcactggtgaattgtagggcctgaaaagaaagctctactgtgtcactcgttttttttgcaaattgaaattgttcttgttgtataatgtgctttggggaaatgtttggtctctcaggtaggtgtgccagccgtttgcaggagggctgagagcgcctgtccactggtggccagacatcatcgggtccgcaggtgtctctgagtgtcagggtcacctcctgatagaagtgggagtggtgtcttactgccaggtcacactgaaggtgggagacaggaggacactactccgtgctaggaaccatggtccttgtcatcttcctgagagcaaacggggtcgggactccagcctaggacttggagactccctgcatccccagctaccctgcaggtgaaacttcactgagcccacttgacttcaggtgggagaggaggaggcacaccgttgtggtgtgcgttaccaaaaaagcagtaacctaactgtggaacagttcaggatctttagacttgatacttttcttgatttcccttaggggtcaaagttcacaaggaaaatagccctttagtgggaaactgaaacaggcttgtttttatttactatttactcatatttgtaatgcaattaaaatatatgttgttaactttttttttttttctcaagagctcggttgataaaaccaggggtatgtggactttttgagtctgtgccttttgggggtgtgtatgggaatgttatgttttaacgttttttacaaaatagtattgtctttttaatttattcgttagtggtttgcacaaggaagataatcgatagtcatgttttttagactctctgtattgcttggtaagctacgtagtaaaaaatgtttacttttccttaaatgttttgaatttcggggttatgaaatttgttgagtaatttttagacagtcacatcttgttgactggaggcatctagtggaaaaatgcagtatttcagcctgattgtgtttgaagtaaatgattaaaagaggaggaagttaccacattctggaagatttacttgagacagacgaaccttgaattacgggaaaaggccccgtgatttaggaaataacaaatttgggaaacatgtaatggggagagactggggaataccccagttgtgaaagtacttcctgtaaggcaacatctgacaccaggaacctttctcttcagtattttaaaaacaacttaatttcagtcctttacttgtggaatcagagccttacttatgtaatacaacccactggaaaaaagctttttattgtattgtactatattgtttataagtgattgagtacctgcagagctttcttttacttaaacatattttaaaaattattaaaaagattttcatgtttgaaaacttggggaaaaaagataaaacaatgtcataatctcatcacatttaactgactaatatgaatatttttcaacaaaaagcatttgacttttattattatttgaggcaaaaactaaactgaaaccaaataaaatgttgaatttcagaaaagtgttcttaaaagcagatattaagccctcaatttttattaattttaaaatgagtaagcaaactgtaagatgttaagattattaaattatctctcattaagcatgtatctttcccattttaaaaattcagttactattgatttattaaaaaacaatagaaaagttacatctatttttagagtgactctcaagaaaatttaataagggaaacacagatctataaaaaactgtttgtaaacctaacaaaggaaaaaaaaagttggtgtctttaaaaaaccctttgagattagctgtgtattcagatatcagttggttctctcctttctgaatcgctaaacaactggagcttgtttcagaaagcagcattgtctacgtatgttccttttaaaaattttttttttaattctgtctaaaaaaaacagacggggtcacactatgttgcccaggctgctcttgaattcctgggctcccctatccacgcacctcggccttccagagtgctgggattacaggtgtgagccaccgtgcctagtcagacatacttttttttttttttttttttttgacggaatctcagtctgtcccgcaggttggagtgcagtgatgtgatctcggctcactacaacctccgtctcctgggttcaagcaattctcctgcctcagcctcctgagtagctgggattacaggcgtacgccaccacgcctggctactttttgtgggttttttagtagagacagggtttttccatgtcgtccaggctggtctggaactcctgacctcaagtgatccgcccatctcagcctcccaaagtgctgggattacaggcgtgagccacctcacctggccttgtatgtatgtttttttctttctctttctttttttttttctgtgacggagtattgccctgtcgcccaggctggagtgcagtggcgtgttcttggttcactgcaacctctgcctcctgggttcaagccattctcctgcctcatgctcctgagtagctgggattataggcacgcgccaccatacctggctaatttctgtatttttagtgaagacagggtttcaccatgttggccaggccggtcttgaaatcctgacctgaagagagctgcccgcctcggcttcccaaagtgctgagattacaggcgtgagccaccgcacccggcccagacatatgttcttaacgtacactttcagaacagcagttgagaactttttccaaaatgtaagctccttgagagcaaagctctcagtgggtctctgtgtcctttactttgcttctcttggtatcttgtggataatatgcacaaaatatttattaaacaagaggatttccatttttttctaatattaatagttcatttagtctgtagcttcttgaaggcatagaaaagactattttattttgcctacttatttggcaaggtacccatgcagtatgccaggagttacagggcctattgagaaggagtaaagggtctgggaggggtggcagggagttgctaattcatgtatggtggctagagaaggcttcactgatggggttgatgtttcagtggagacttgaaggaggaacaggaacgcagcatgagactgtcttggggaagagtgttcagcagaggcagcagtgctcagctagccttgaggggaacatccaagttggtcatgtgagtgcaaaaaggccagtgaggctgcagctgcgtgagcacgtgctcaatgacggggtcaagtgcagcgcctcttggtagtaagagtagctgagtgtaaacacctagggttcgctccagtgagaaggggagcctttggagggggcaaggcccacccccaccccccaaaactgaggggatagtggcaccagtgcagtgagaaatactggtcctctgtcccaatgaggtggcagtagagttagggagaagggattaggttctgcttgtgttttatttttttcttttatttttctctgtgtgcttttatatagattggatgtattttaaaggtagagctggctttgctaatggatatgctggtggattggatgtggggtgaagggagaggagtcaaaaatgacatcaggttcccaaggatgtcctgagggacagagctggcatttactgagacgtggaggacaataggaggagtaagtttggggtagaacatcaggagttcaattttgagtatgttgagtttcttgttaatgtgacttggagatatttcccaatgaatcgtcgtctgtcttgaaagtgagagttgaaggttttctgtacagtctgtatgttgagccatacattttagcattctattattttgattgtcctctttggtgtttcatttcctaaaatctcttctatctaagagatccctgagcctagcagccaggagtgaattttctagcttttccacctctgctaggtccttcatcagttgttcagcatgtctgggacaaataattttggggcgggggggtgctgaattttaggacaaacggatgttatagataagctggtcccattatctaatagcttacaaagaaaaaaatataatgtatacagtggttgaaaaagtaggagttacaaaaaaatgtgtttgcattttaacttttcaggagatgttacagcccagatagctcttcagcctgcactgaagttcaatggtggtggtcatatcaatcatagcattttctggacaaacctcagccctaacggtggtggagaacccaaaggttggtatatattggtgcacccttatctacattttgtgcacagtaggaatcgattgttgatttactgaagttaccttatacttgttttttgttttttttgttgttgtttttttgagacaagagttttgctcttgttgcccaggctggagtacagtggcgcagtcttggctcactgcaacctccgcttcctgggttcaagtgattctcctgcctcagcctcccaagtagctgggattacaggcgcccgccaccacgcctggctaatttttgcatttttagtagagatgaggtttcattcaccatgttggccaggctggtcttgaactcctgacctcatgatctgcccaccttggcctcccaaagtgctgggattacaggcatgagccaccgtgcctggcctaagttaccttattcttaccagaggtatcatagtggcatatttttcataacaacgagtatgataaaagttgtaactttcaaaaggacacaagtaggaatggagaatgctttcatggggttatgtcataagattttatgttcacgccaacatagaatatcacatcaactccaccttctggtttctggatggtacttcatattagggaaagactgagagacttcattttatgaactttttttttttgagacggagtcttacagtcgcccaggctggagcgcagtggtgcaatgtcggctcattgcaacctccgcctttcaggttcatgcaattcttgtgtctcagccacccaagtagctgggattacaggcatgtggcatcactcccggctaatttttatatttttggtagagacagggtttcaccatgttggcggggctggtctcgaactcctggcctcaagtgatccacccaccttggcctcccaaagtgctgtggtatggatgtgagccaccgcgccagtctagaaaagatgaactttctgtctactagtttctagggcctggattagatagttaaccgtctgtaccttttttcatctatgtgatacagggataacaatggtgttgttttgagaattaaattatagtgtcatttgctatttttcactctttcctaactgataaaaagtcagttgttccaggaaattaggttttctgggtatttttaaaaagtgttcagggaatgaggagagtacagggctagatggtcttgttcgctatcactgtttccttgacttcctgtgtagcttgtggaggcccagatgactttaattatcttcttcacccagggagggcatgaggcgtaaatgtagttcttgtctcttgtttctgggctccggatatgcaccctaagtttctgtggttttattgttcatttttaatcagtgttatggaaggcagcctatcttatgcacttgaaataagcaatttcattttaaggtaatgatgaatgaggagagtaagcttgggaaactgggcaactttttctttatttttgtttttatttattattattttggagatggagtttagctctttcgcccaggctacagtgaagtggcttgatcttggctcactgcagcctctgcccatcccgggttcaagtgattctctgcctcagcctcccgagtagctgggattataggtgcctgccaccatgcccggctaatttttttgtatttttagtagagaggagtttctccatgttggtcaggctggttttgaactcctgacctcaggtgatccacctgtctcggcctcccaaagtactaagattacaggtgtgagccaccgtgcctggccaacttattttttttctgagttcagtcttctagactatcggttaatacttttgaagttttgtcagttaccagaatatcagatatattcatatgcaaccagtggttttggtatgctgccatttttgtttaatctgtaccacattccatcatttgtgcttataaagatgattacttttaaacccgtagaataagagaagtgagattttgacccagttgatttagttgatgtgactaatctagaattatattctgtattactacagaataaaaggattacagctcttaaagtatacccttagttcagtcgtagagaaaactgcccatcaagacaggaagagctgggctgccttggagaagaacaatgactttattcccaaatggaggcgtagaagaaggagggtagaagtcaaaggaaaattttctattcagggaaaagaaaaagctaacagaaagtagtatttctttcctaacaaagatagtacagtgagtggggaaatccctctaacacgattcattaaaaaatgtgaactacgcagctggaggccattatcctaagcgaattaacccaggaacagaaaaccaaataccacatgtctcacttgcaagtggaagctaaacatggagtacttatggatataaaaatggcagcaacagacactgaggacagagcagggagggagaaagaaggggacggggggtgaaaactgttgtatactaagctcgctacctgggtgatggcatcaattgcaccccagacctcagcatcatatgatacccgtgtaacaaacctgtgcgtgtaccctctgaatttaaaataaaatttgaaccgggcacggtggctcacgcctgtattcccagcactttgggaggccaaggcgggtggatcacctgaggttgggagtttgagaccagcctgaccaacatggagaaaccctgtctctactaaaaacacaaaattagccgggcgtgatggcacgtgcctgtaatcgcagctgctcgggaggctaaggcaggagaattgcttgaacctgggaggcagaggttgcagtgacccgagatcatggcattgcactccagcctgggcaacaagagtgaaactccgtctcaaaaggtaaaaaatgaaaaaaaaaaaaaaaaaaaaaaaaagttgaagttataaaaaacaaaaacgtgaattaaaattgtgaaacttagatccaggtgtcgcattctgatgttgtctaatttcttgggccctatgacaaaaatattttaatacatgtaatataacattttactgtaattattgaaatctgttcatttgtgggtggttttggattttttttttaataggggagttgctggaagccatcaaacgtgactttggttcctttgacaagtttaaggagaagctgacggctgcatctgttggtgtccaaggctcaggttggggttggcttggtttcaataaggaacggggacacttacaaattgctgcttgtccaaatcaggatccactgcaaggaacaacaggttagatttaaaaattgtgatttcatttgggagagatgctctactgtaaagcattcaactagaaataaggaaaactaacagtgttttaagaacatgtaataatttgcaaatcttaacagataacacccagagtcttgtgtaagtaaaaatgttttagaagtcctgatatttcataaaattaagtacacgtaattttataggtacattaacaaacatgttttatttttatttattttttttgagacagatctcactgttgcccaggctggagtgcagtggtgcgatctcggttcactgcaacctccgcctcctgggttcaagtgattctcctgcctcagcctcccaaatagctgggattacaggcacataccaccatgcccagctaatttttgtgtttttagtacagacagggtttcaccatgttggccaggctggtcttgaactcctgacctcaggtatctgcctgcctcggcctcctgaagtgctgggattacaggcatgagccaccatgcccagccaaatgttttacttattaaccctgcttcattctacagagaattaatatcagcttagataattatatgtactaaaataaaaaaaaaattagctatagaacaagagtgaggaaaagaaatacaagcagagactgatttcagagcttgtactgttacctcctctgctgagcatttgaggttaaactgggactagatctcaggtttccagaccttctgcctttctggggctctttggtagagtatatgaaaatattcggcttggaagtgccaggctgggctcaccaaatactttgctgttgagcctaattggatttaaaaaatgtcactgaagagtatgggaaatagagccatgagttgtctggcagagggttgggactttgaacttaaagtgataccttcacatcaacaacagtcattctctgccccttcttctacccctgacattggaatactcttgatctgtggctcacttcacaggatagacccagattttggcagaatctgaacagctcttttgggacagtgacatggcataacaatttgtaaaagccacaaaaaatttgtaagcaccgatctgtagagtcaggttatttgtagagctgcatgaccagaaaggctgatatttgtaagtgagtcccagctacactccttcctctccctgtggaaagcacattagaaggaaaatgagggaatgtcatggccttttgtttataaaaatcattaataaattttgctacttgaaattattaataataaattactagtgacctccctcacaactgatcaagacatactggttaagaattgtttttgtagagagagctataatttattttgagtgtttttgtgtgtgcgtgatggagtctcactctgttgcccaggctggagtgcagtggcgcaatcttggctcactacaacttccgcctcccaggttcaagcaattctcctgcgtcagcttcctgagtagctgggattacaggcgcctgccacctcgccaggctaattttttgtatttttagtagaggcggggtttcaccatgttggccaggctggtctcgaacgcctgacctcaagagatctgcctgcctcggcctcccaaagtgctgggattacaggcctgagccactgcgcccagaccaaaagtttttttaaatggatgttttacagatagaactaaattcttcatttacctcacttaatttctgaaaacactgtgtcctccaactgctctgtattcccaaagattaaaattagccttggggagcagagctggttcctcgtaaacccctgtgagtgcccagaccctttggaggaggttctcagtgggcttttgcctgctcccacagatgtaacccacccttcctgctgctcctaagaccaccatgaggaaggctgggaattggctcttgaattaatttgttggtatttttaagaatagctattaaagtactgttgttaattttcccaagtctattttattgttagtatttgtcacattttctttgtaaacagtgaattaaaaatattttataggaatattcattcttatctagatttcctacttatataaaaaaacaagtgaatgagattgttacaaagggtaattttgtgtgagtagaataataaaagttgaaattgagaagatgcaatgttttagactgaaactgatggttggtttgttttccccttctttctaacaggccttattccactgctggggattgatgtgtgggagcacgcttactaccttcagtataaaaatgtcaggcctgattatctaaaagctatttggaatgtaatcaactgggagaatgtaactgaaagatacatggcttgcaaaaagtaaaccacgatcgttatgctgagtatgttaagctctttatgactgtttttgtagtggtatagagtactgcagaatacagtaagctgctctattgtagcatttcttgatgttgcttagtcacttatttcataaacaacttaatgttctgaataatttcttactaaacattttgttattgggcaagtgattgaaaatagtaaatgctttgtgtgattgaatctgattggacattttcttcagagagctaaattacaattgtcatttataaaaccatcaaaaatattccatccatatactttggggacttgtagggatgcctttctagtcctattctattgcagttatagaaaatctagtcttttgccccagttacttaaaaataaaatattaacactttcccaagggaaacactcggctttctatagaaaattgcactttttgtcgagtaatcctctgcagtgatacttctggtagatgtcacccagtggtttttgttaggtcaaatgttcctgtatagtttttgcaaatagagctgtatactgtttaaatgtagcaggtgaactgaactggggtttgctcacctgcacagtaaaggcaaacttcaacagcaaaactgcaaaaaggtggtttttgcagtaggagaaaggaggatgtttatttgcagggcgccaagcaaggagaattgggcagctcatgcttgagacccaatctccatgatgacctacaagctagagtatttaaaggcagtggtaaatttcaggaaagcagaagttaaaggcaaaattgtaaatcagtcgagatcgggtgccttcagggtggtatggctgtataccaaaattgtaaatcactacatgaagcttatatattggtttggcctgaaaggtgaagtggggtaggcagggggcgggcttacaggttatggtggattcaaagactccctgatttgtgattggttaaggaagcaaagctttgtctaaaaacttggggtccgcagaaaggaacattaaggtctggccaggcccctcaggaagaaactgagagcaaagaatggaggtcagagtttagtccctggtgttcccccttatctgacgtctgtgtgaatccatttggtgggggtctgggtttctgaaaagtagctcaggggcacgtgttaaggatgtctctaggtgactctaacttccctggctattgtttgaaactgttatgaccttcttgcttatcagcttgctggtttccttctcggggcgagctgggtgcctggagttttcggtgaaggaaactcaagattctcctttatttctgtgcttgtgggaatccccctggcacaccccaaagaggggtccctgctccgtctcacagggatctttttgtatatttggcttagcatcatacatttgccatgttgtttcatcatctgcctaatttactgtttttgaatatttcatttgtttctaattgttactacagataatgctggggtgagcaactctgtgtacataggtttatctcctattggaatattttctttatataggcgttttttttttttctttttttttggagacagagtcttgctctgttgcccaggctggagtgcagtggcgcgaccggagctcactgcaacctccacttcccgggttcaagtgattgtcccacctcagcctcctgaatagctgggattacaggtgcatgctaccatgcctggctactttttgtatttttagcagagacagggtttcaccatgttggccagggtggtctcgaactcctgacctcaagtgatccgtctggctcagcctcccaaagtgctgggattacaggtgtgagccactgcacctggcctatataggcttttttcttaaacctatttagtaatgttttcccaagtttattttttatttttaattttttccccaagtttatttttctatttttttttcatggaaaaatggggtaacttagcagtttcaatattgaagactgaagtttaaaaaaaatttaaattcaaggtacttttaaaattcagttagaaaagtaggctttaaaaattattagagacaagagtaccaaagcggtgtgtgtatgtgtgtgtgtgtatgcatgcttgtggattggaaaaactttggagactgattacttttcattatatatgtgtcacagtgaaacagcttttatgtgtcatgtaagattactgcttgcctctctaaggaaggtcgtgactgtttaaatagacgggcaaggtggaaccttttgaaagatgagcttttgaatataagttgtctgctagatcatggtttgtattgaactaacaaggtttgcagatctgctgacttatataaagctttttgattcctactaagctttaagatttaaaaaatgttcaatgttgaaatttctgtggggctctatttttgctttggctttctggtgagagagtgaggaagcattctttccttcactaagtttgtctttcttgtcttctggatagattgattttaagagactaagggaatttacaaactaaagattttagtcatctggtggaaaaggagactttaagattgtttagggctgggcggggtgactcacatctgtaatcccagcactttgggaggccaaggcaggcagaacacttgaaggagttcaagaccagcgtggccaacgtggtgaaaccctgtctctactaaaaatacaaaaattgtttagctctgtttttcataatagaaatagaaaaggtaaaattgcttttcttctgaaaagaacaagtattgttcatccaagaagggtttttgtgactgaatcagcagtgcctgccctagtcatagctgtgcttcaaaaacctcagcatgattagtgttggagcaaaacaaggaagcaaagcaaatactgtttttgaaattctatctgttgcttgaactattttgtaataattaaactttgatgttgagaaatcacaactttattgtacacttcattgcaacttgaaattcatggtcttaaagtgagatttgaatttctattgagcgcctttaaaaaagtaataccaaaccataaagttaaaatctatgtatattgagtcatatctaaaaccacgtataaacataaattgtatttcctgttttaattccaggggaagtactgtttgggaaagctattattaggtaaatgttttacaaattactgtttctcactttcagtcataccctaatgatcccagcaagataatgtcctgtcttctaagatgtgcatcaagcctggtacatactgaaaaccctataaggtcctggataatttttgtttgattattcattgaagaaacatttattttccaattgtgtgaagtttttgactgttaataaaagaatctgtcaaccatcaaagaggtctgcattatgcttgcatgtcaaaaactttaaaaatcctataatcttctgtcattttcactgagtttccatgggaaaggaatagtaaataatgggtagttgaaatattactcttaagaccaagacctgtatctccagtcatatctgtaataacatcatctgataacctaaaagcatagtattagggatatacgacaaaaccaaagtgtttttgctgttgtcacataccactcaatacttttacaccaggttgtccagtggacaccagctggatgtcctataattcaattctgacactgtctacctggaattggagtcagatcccacaggtggagggctcagcccacaagactgcccccactccagataccaatcgcaagtccctatacttctgactggctataaagtggggttcccgtgaccctttccttggttttgatttatttgctagagcagctcccagaacacagagaaacactctacttatgtttacccatttttaattttattactttattaaaactacatattggttacaatactaatttattgtaaaggatatttcatttatttatttttttatttagagatggagtctcactgtgtcacccaggctggagtgcggtggcacagtctcaactcactgcaacctccacctcctgagttcaagcgattctcatgcctcagcctcccaagtagctgggattacaagtgtgcaccaccatgcccagctaatttttgtatttttagtagagatggggtttcactctgttggccaggctggtctcaaactcctgacctcaagtcatccacccacctcagcctcccaaagtgctgagattacaggtgtgagccattgcctctggcttgtaaaggatatttcaaagaatacagatgaacagccagatggaagagatgcacagggcaaggcatgtgggaaggggtatggagctttcatgctctctccacgtcatcagctacccagaagctcatctggaccccgaccctttggggttttacggaggcttcattatgtcagcattaccattggcaattggcgattaactcaaccttcagcctctctcccctttctggaggttgggggttgaggctgggagtccaaaccctccaatcttgccttggtctttctggtaagcagccccccgtcctgaagctacctagaggctcccagccaccaatcatttcattggcaaaccaaagatacttcaaggggtttaggagccaagagaccaagcaaggattgagacaatatatatatttcttataaataacatgatcacaaatagtattttatatatttctcataatagctggttgtggttactcacacctatcatcccagctactaagaagctaaggcaggaggatcacaggcccaggagtttgcagctgtagtgagctatgattgtgctactgcactccagcctgggtgacagtgtgagaccctgtctcttaaagttcttgtaacatcttagaacattaaccaaccacagattattgccttaactctgaaaaataaagtaatcatacttttacaagatgtattttacataaagttctggtgatattttactctggtcattggaatataggagcttaccacctggtaccactcttcctaaagtggtatactatttggtatagtactggcatactatttggaaagggatgtgaagttggcatgacctgtctagggtgaagtcatgctgtctgctattcattgtgggctttacagtaatgagagtgcttctgttgtcaagatgcttctgggacacgttaaaaaaaatttaagatttctcagtttgtgaaaaggaaggagcacgaatgctttcaagttcctatgacatgctagtcatctttcagtgtgtcccattgttgcacccagtagtctcgatgcccagcgtcacggtgattccaagtttgcctctctgcccactataatttgtgctccatgaagtcccaggacatgaggttcttgttcatttgtgcgtctgggcccatatccaaatattaaacaatgtgacttaatgtatttatcatattgtaaatatgggtatccccaaggctcagaagttaacacagcatatccacagagaggtttgacagcatggctgtggtgactgggaaggccttatgcttgctcctccttctgctgcttgcctttgtgtgggcatggaaagaacattgaattaggtactggaagacctgggtcctggtcttggagattttaccagagcacctgtgggatattggtcaagatgcctggttttagtcctgctcctttgctgtgaaagaggatcttaaggtgccaactctggcattttattttttacttatttatttttaaattatactttaagttctagggtacatgtgtacaacatgcaggtttgttacatgtatacatgtgccatgttggtgtgctgcacctattaactcgtcatttacattaggtatatctcctaatgctatccctcccccttctccccacccctcgacaggccccggtgtgtgatgttccccttcctgtgtccaagtgttctcattgttcaattcccatctatgagtgagaacatgcggtgtttgtttttttgtccttggaatagtttgctgagaaggatggtttccagcttcatccatgtccctataaaggacatgaactcttccttttttatggctgcatagtattccatggtgtatatgtgccacatcttcttaaaccaatctatcattgatggacatttgggttggttccaagtctttgctattgtgaacagtgccacaataaatatacgtgtgcatgtgtctttatagcagcatgatttataatcctttgggtatatacccagtaatgggatggctgggtcaaatggtatttctagttctagatccctgaggaatcgccacactgtcttccacaatggttgaactagtttacagtcccaccaccagtgtaaaagtgttcctatttctccacatcctctccagcacctgttgtttcctgactttttaatgattgacattctaactggtgtgagatggtatctcattgtggttttgatttgcatttctctgatggcccatgatgatgagcatttttttcatgtgtctgttggatgcatggatgtcttcttttgagaagtgtctcttcatatccttcacctactttttgatggggtttgtttttttcttgtaagtttgtttgagttccttgtagattctggatattagccctttgtcagatgagtagattgcaaaaattttctcccattttgtaggttgcctgttcactctgatggtagtttcttttgctgtgcagaagctcttgagtttaatgagatcccatttgtcaattttggcttctgttgccattgcttttggtgttttagacatgaagtccttgcccatgcctgtgtcctgaatggtactgcataggttttcttctagggtttttatggttttaggtctaacatttaagtctttaatccatcttgaattaatttttgtataaggtgtaaggaagggatccagtttcagctttctacatgtggctagccagttttcccagcaccatttattaaatagggaatcctttccccatttcttgtttttgtcaggtttctcaaagatcagatagttgtagatgtgtggtattatttctgagggctctgttctgttccattggtctatatctctgttttggtactagtaccatgctgttttggttactgcagccttgtagtatagtttgaaatcaggtagcgtgatgcctccagctttgttcttttggcttaggatcgttttggcagtgcaggctcttttttggttccacatgaactttaaagtagttttttccaattctatgaagaaagtcatgggtagcttgatggggatggcattgaatctataaattaccttgggcagtatagccattttcacgatattgattcttcctatccatgagcatggaatgttcttccatttgtttgtgtcctcttttatttccttgagcagtggtttgtagttctccttgaagaggtccttcacatcccttgtaagttggattcctaggtattttattctctttgaggcagttgtgaatgggagttcactcatgatttggctctctgtttgtctgttgttggtgtataagaatgcttgtgatttttgcacattgattttgtatcctgagattttgctgaagttgcttatcaaattaaggagattttgggctgagatgatggggttttctaaatataaaatcatgtcatctgcaaacagggacaatttgacttcctcttttccttattgaataccctttatttctttctcctgcctgatggccctggccagaacttccaacactatgttgaataggagtggtgagagagggcatccctgtcttgtgccagttttcaaagggaatgcttccagtttttgcccattcagtctgatattggctgtgggtttgtcatagatagctcttattattttgagatatgtcccatcaatacctaattcattgagagtttttagcatgaagggctgttgaattttgtccaaggccttttctgcatctgttgagataatcatgtggtttttgtctttggttctgtttatatgctggattacttttattgatttgtgtatgttgaaccagccttgcatcccagggatgaagcccacttgatcatggtggataagctttttgatatgctgctggattcagtttgccagtattttattgaggatttttgcattgattttcatcagggatattggtctaaagttctctttttttgttatgtctctgccaggctttggtatcaggatgatgctggcttcataaaatgagttagggaggattccctctttttctattgattggaatagtttcagaaggaatggtaccagctcttccttgtacctctggtagaattcggctgtgaatccatcttgtcctggactttttttggttggtaggctattaattattgcctcaatttcagagcctgttattggtctattcagggattaaacttcttcctggtttagttttgagagggtgtatgtgtccaggaatttatctatttcttctagattttctagtttatttgcatagaggtgtttatagtattctctgtgtactctgtatttctgtgggattggtggtgatatccactttatcattttttattgcatttatttgattcttctctcttttcttgtttattagtcttgctagcggtctatcaattgtgtttatcttttcaaaaaaccagctcctggattcattcattttttgaaggtttttttgtgtctctgtctccttcagttctgctctgatcttagttatttcttgtcttctgctagctgttgaatgtgtttgctcttgcttctctaatatttttaattgtgatgttagagtgtcaattttagatctttcctgctttctcttgtgggcacttagtgctgtaaatttccctctacacactgctttaaatgtgtcccagagattctggtatgttgtgtctttgttctcgttggtttcaaagaacatctttatttctgccttcattttgttatgtacccagtagtcattcaggagcaggttgttcagtttccatgtagctgagtggttttgagtgagtttcttaatcctgagttctagtttgattgcactgtggtctgagacagtatgttataatttctgttcttttacatttgctgaggagtgctttacttccaactatgtggtcaattttggaataggtgcgatgtggtgctgagaagaatgtatattctgttgatttggggtggagagttctgtagatgtctattaggtctgcttggtgcagagctgaattcaattcctggatatccttgttaactttctgtctcgttgatctgtctaatattgacagtggggtgttagagtctcccattgttattgtgtgggagtctaaatctctttgtaggtctctaaggacttggtttatgaatctgggtgctcctgtattgggtgcatatatatttaagatagttagctcttcttgttgaattgatccctttactatcatgtaatggccttctttgtctcttttgatctttgttggtttaaagtctgttttatcagagactaggattgcaaccccggcctttttttttgttttccgtttgcttggtagatcttcctccatccttttattttgagcctatgtgtgtgtgtctctgtacgtgagatgggtttcctgaatacagcaccctgatgggtcttgactctttatccagtgtgccagtctgtgtcttttaattggagcatttagcccatttacatttaaggttaatattgttatgtgtgaatttgatcctgtcactaggatgttcactggttattttgctcgttagttgatgcagtttcttcctagcctcaatggtctttacaatttggcatgtttttgcagtggctgatactggttgttccattccatgtttagtgcttccttcaggagctcttgtaaggcaggcctggtggtgacaaaatctctcagcatttgcttgtttgtaaaggattttatttctccttcacttatgaagcttagtttggctggatatgaaattctgggttgaaaattcttttcttcaagaacgttgaatattgacccccactctcttctggcttgtagagtttctgctgagagatcagctgttagtctgatgggcttccctttgtgggtaacccgacctttctctctggctgcccttaacattttttccttcatttcaactttggtgaatctgacaattatgtgtcttggagttgctcttctcgaggagtatctttgtggcgttctctgtatttcctgaatttgaatgttgtcctcccttgctagattggggaagttctcctggataatatcctgcagagtgttttccagcttggttccattctccccgtcactttcaggtacaccaatcagacgtagatttggtcttttcacatagtcccatatttcttggaagctttgttcgtttctttttactcttttttctcttaacttctcttctcacttcatttcattcatctgatcttcaatcactgataacctttcttccagttgatcgaattggctactgaagcttgtgcattcgtcacgtagttctcatgccatggttttcagctccatcaggtcatttaaggacttctctatgctggttattctagttagccatttgtctaatcttttttcaaggtttttaggttctttgtgatgggttcgaacttcctcttttagcttggagaagtttgatcatctgaagccttcttctctcaactcgtcaaagtcattctccgtccagctttgttctgttgctggcaaggagctatgttcctttggagggggagaggcgctctgatttttagaattttcagcttttctgctctgttttttccccatctttgtggttttatctacctttggtctttggtgatggtgatgtgcagatggggttttggtgtggatgtcctttctgtttgttagttttccttctaacagtcaggaccgccagctgcaggtctgttggagtttgctggacgtccacgccagaccctgtttgcctgggtatcacagtggaggctgtagaacagcgaatattgctgaacagcaaatgttgctgcctgatcattcctctggaagcttcatctcagaggggtacccggccatgtggggtgtcagtctgcccctacttgggggtgcctcccagttaggctactcgggggtcagggactcacttgaggaggcagtctctccgttctcagatctcaaactctgtgctgggagaaccactggtctcttcaaagctgtcagacagggacattgaagtctgcagagatttctgctgccttttgttcggctatgccatgcccccagaggtggagtctacagaggcaggcaggcaggcctccttgagctgcagtgggctccacctagttcgagcttcccggctgctttatttacctactgaagcctcagcaatggtgggctcccctcccctagcctcactgccaccttgcagttcgatctcagactgctgtgctagcaatgagcaaggctccatgggcgtgggaccctccgagctaggcacaggatataatctcctggtgtgccgtttgctaagaccattggaaaaacgcagtattagggtgggagtgacccaattttccaggtgccgtctgtcacagcttcccttggctaggaaagggaattccctgaccccttgccttcccgggtgaggccatgccttgccctgcttcagctcatgctcagtgggctgcacccaccgtcctacacccactgtccaacaagccccagtgagatgaacctggtacctcagttggaagtgcagaaatcacctgtcttctgcgtcgctcacgctgggagctgtagactggagctgttcctattcggccatcttggaacccaacccaagtctggcattttttggttttctctgtgtattgactatgattatagaggataaatggatattgatattattaaatcgtcatttacagaaggcacacaacttatatcctttaaacaaagttctccaaccagtagggtatacttgctggtagtgcttacagctgccaccattcttcactggggctcagagtggatgcctggaggaaaaaaacaaatgaatcttttagctcctagttactgttagcatttttaccagaaaacaatttaaaaaatgacacaagtaagtcttcacctatcaaggctgagtgtggtggcctatacttgtaatctctgtgctttgggaggccaacgcaggaggatctcttgagtccaggagtttgagaccagcctgggcaacaaagcaagaccccatctctacagaaagttaaaatttagctgggcatgctggcacatccctatagtcccagctacttgagaggctgagttgggaggatcccttgaggtcatgagttggagtctacagtgagctgtgattacagtgtgagtctacactgcactccagtctgggtgaaagagatcctgtctctcaaaaaacaagtgattctcctgggaagagatttgtttaaaaagtctgcacctctattgatgataactttgaatgtaaatggattaaattctcccacttaaaagatatagattgactgaatggattaaaaaccaccatcatgactcgactgtatgctgcctacaagaaacctcacctgtaaagacaggccaaaagtgaaggtatggagaaagatattgcatacaaatggaagccaaaaaagagcagaaataactatacttacatgagataaaatagactttaagtcaaaaactgtaaaaagaaaagtcattatgtaatgaaacaaggatcaattcatgcaagatataatcatatttttttattaagaaaatttttttgtagagatggggttatgctatgttgcctggctagtctcaaactctgggtctcaaagcagtcctcctgctttggcctcctaaggtgctgggattataggcatgagccactgtgccaggcctgaggatattatcattataaatatatatgtaccccacactggatgacccagatataaagcaaatattattagatttaaagggagaaatagactctaatacaatagtagttgaggacttcactctactctcagcattggacagattttctagacataaaaccaataaatattggatttaaattgcactttacaccaaatggacctgacatttacagaacattctaataggtgcagaacactctaatagctgcagaacacacgttcttttcatcagcacatggaacattcaccagactagttctggaacccacttcctgccttagtgttctttccaccacagtgcatgataattccgacagaacgccttttatttgtaccttattagttgtagggggaaagctttttcatgtacaaaaatgctgtaattttctgatttaataaagtaattccactgatgtttttatttacttcttgatatacatgttttaaatgtatcctttcatttcctccttagtcccaaagtatatcattgtttacaaaacagttttttaccccctaaaaagcttatttttatttggttaagcttttctgtaagaatgcctgggatgagcccaaagtgaatgtacccctgcaaagagggtagatgaaagacagtgtgtggctttaatttctatttttggggaactcaaccatcaaatggttaaggaataagattccttatgtggttcttgtaaacaaattgagattttggttggggggtgtcaaaagtgacattttcatttttttcagacaaaatgagatatttggggccagattcgggcctttgcatggtgtatactgaatgatcaattttctcactttgagtgtgtcaaaccttctgtctcaagagtcactcctccagggctttcctttttttttttttttttttttttttttgaggtggagttttacttttgttgcctaggctggagtgcaaaggtgcaatcttggcttaccacaacctccgcctctcaggttccagcgattctcctgcctcagcctccggagtagctgggattacaggcatg

SEQ ID NO: 33 - DNA, 19588 bp, Homo sapiens
cacctccctccggggcgggcgtggggccagctcaggacaggcgctcgggggacgcgtgtcctcaccccacggggacggtggaggagagtcagcgagggcccgaggggcaggtactttaacgaatggctctcttggtgtcccctgcgccccgtcggcccatttttctttttacaaaacgggcccagtctctagtatccacctctcgccatcaaccaggcattccgggagatcagctcgcccgaaagcccctgcgccaccccgcgggccctcctaggtggtctccccagccccgtcccttttcgggatgcttgctgatcaccccgagcccgcgtggcgcaagagtacgagcgccgagcccgtgcgcgccaaggctgcgtgggcgggcaccgacttttctgagaagttctagtgctcccaagccccgacccccgcccccttcactttctagctggaaagttgcgcgccaggcagcggggggcggagagaggagcccagactggcccccacctcccgcttcctgcccggccgccgcccattggccggaggaatccccaggaatgcgagcgcccctttaaaagcgcgcggctcctccgccttgccagccgctgcgcccgagctggcctgcgagttcagggctcctgtcgctctccaggagcaacctctactccggacgcacaggcattccccgcgcccctccagccctcgccgccctcgccaccgctcccggccgccgcgctccggtacacacaggtaagtcgcccccggcggccgccgaggaccaaagctgcccgggacatccacctggagcgctgaggcttcagtccctctggtggaccccggaacctacactctccccgctcgcctaccccagcccgctcctctcagccgctggaggactcttcagggcaaggctccagagccatcctctccagccttgaggttcacaaaccaactcatcaggacaccccaagatttccttactctctgaagtcctccttaagcctttgtatcagcactccagggaagagtctgtacttcccctgccctccctgcaaccccaaactacagttcctgatcttgctcaccttcgacttcccaaaagcccccaaattgttggtcttgcgccccccacactttaaaaccagcatctctttcctccacctctctctctctctctctctctctctctcatgctctctggaaagtaatcctgttgtccttcatttcagcaaacgcggggtcaaagagggatggtcccggccctgtccccatgcccagccccgtttctgcgcaccgtccctccctgcctagctgatctctgaccctcggctcttgtgcttcctgctacaggatccctgctgggcaccaacagctccaccatggggctggcctggggactaggcgtcctgttcctgatgcatgtgtgtggcaccaaccgcattccaggtgagtttgtgtggcacctttaggggaaggagggacaaggaagaggtgctggctatcccaggtgtgccccctcacgtgctgtcctctccctcttgagcctgactggacatcaggacgcagcttcactctgatcctggtatttattcacctctttcagtggttgccaggagttttcaccccaaccctttgtctccacccctaaggactcagccccctactgctggtcccagcctagaaagctcactttgtgttctctcctgtctaacagagtctggcggagacaacagcgtgtttgacatctttgaactcaccggggccgcccgcaaggggtctgggcgccgactggtgaagggccccgacccttccagcccagctttccgcatcgaggatgccaacctgatcccccctgtgcctgatgacaagttccaagacctggtggatgctgtgcgggcagaaaagggtttcctccttctggcatccctgaggcagatgaagaagacccggggcacgctgctggccctggagcggaaagaccactctggccaggtcttcagcgtggtgtccaatggcaaggcgggcaccctggacctcagcctgaccgtccaaggaaagcagcacgtggtgtctgtggaagaagctctcctggcaaccggccagtggaagagcatcaccctgtttgtgcaggaagacagggcccagctgtacatcgactgtgaaaagatggagaatgctgagttggacgtccccatccaaagcgtcttcaccagagacctggccagcatcgccagactccgcatcgcaaaggggggcgtcaatgacaatttccaggtgaggcttcttctctgagccctgctccgtgggatcatctgctagacaggtgacctgccaggagggctacaggaaatcctgtctgtaaactaacgcagcagttctcagattttaggcagcatgagcatcacctggagggcttgtgaaagctcaccctgctgcaccccagccccagagtctgggattctgtaaaactgcaactctaacaagtaccaggtgatgctgatgccggtggtctgggaagcacactttgaaaactactcaaggaaacaagaaatggttttcctttagcagtcagcctgttcaagccttagatactccttaggctcttaagaaaagagcttatttcaaatgcattcccccaattttaatcttgtttgaaatggatactttctatgggcagaatcagtaccactttgctattggattcctcatggggatgcagctggtctcacataaaaggttaaaatagcagttagttgttgctgttacagcttcatctgtgccttaacttctagatctttgcaacggtggctttgaactcccacatttaactctttgacactggaaagtgtcattatatcctctaggcttaggatcagattccatttcctgtgtacccaagtaggctgataactgaattctttgtaaaatactcaagacttggcagaagtcacaattaagattttgaagttgtttggcgattaatgttgctgtgttattttgacatagtgatcttaagacagctctttgaagcttttagaacatctattgtatgcttttcctagcatacagacagtctcccccaaccccatccccaccccgctctgcattctacaagtaatgtgtgtcctctgcccacagggggtgctgcagaatgtgaggtttgtctttggaaccacaccagaagacatcctcaggaacaaaggctgctccagctgtgagtacccctctatttttagggcacatagggaatcagggggaattccaccaaaaacaaactgaggaatttagcaatagtggttatacataaattacccccagtgagatcatcaagaggcatacagaagtgactccaaggggtattatacacacacacgtatacacacgtgcgcatacacgcaacccctctacctgcatccttcacaccaaatgaaacgtcttctaccactaagaactcaagaggctggttggtaagagtatctatttgaagttttcattttgtttcttgccagctaccagtgtcctcctcacccttgacaacaacgtggtgaatggttccagccctgccatccgcactaactacattggccacaagacaaaggacttgcaagccatctgcggcatctcctgtgatgagctgtccagcatggtcctggaactcaggggcctgcgcaccattgtgaccacgctgcaggacagcatccgcaaagtggtcagtggcctctgcacccagcccgttagcatgaaccctggaaggtttatcgcagatggtcccaaatgactgaaaatgcggggggacactaatgatattctctcccatttagactgaagagaacaaagagttggccaatgagctgaggcggcctcccctatgctatcacaacggagttcagtacagaaataacgaggaatggactgttgatagctgcactgagtgtcactgtcaggtaagggaccttcaccagccagaataagaatcgacggcttttgtttgaacctacatctttggggaaataccctaatcgccacagagattctttttatgttccatggcctgataacaaagtgttttttttttctttaagatgcaattatggcatctataagttcttctttaaactctcagatggtttatcaaagtattaattataccccaggctaagtatctaagagaatgaatctactaagacatctgaataatttacctaccttagttcaaagactaagtgttgaatgtcaggtaaataaaacctggttggaacattcatttttttttcccaaccctgatttatattcagctttggcataggttcttttagtacagtagcaattgtttttcaaatcacttagtctgacactgttaggatgttactgtctgctttgctcagatggcactgccaggtgtgtgattcactctagcatccccgcatgccagtggccagtgagtttggaggttcacctggcttatctattaatagcaaagtatttgaatttgcttaaatacaaatcacagatgactggctgtgggaaccaacttcattaaattccctttcttttccaatataaagacagatcacagatctatagatgaggaaaaagtgcttatagatcttccttcctccccccaaacacataatataaaaatgtaaaagtcctggctgaattttctgagtttgatttcagacatagatttgacccatgatgtttgttggttcctctgctataaattctttgtactgtaacttccacccttgactaagtagcaattaaaaagaactttccaaggaatggagtgacacgtaaactagcactagaactgtctctacgatagtggtggctgcaaatatgacagagacagatctatgaaaatcattccactagagcattgacagccctgaccatgttttggcttgtaaaggaaatgttacaggatgtagacttctgtatgcaacatgctcagcagcctgttcccctctcactctcttgccctgcagaactcagttaccatctgcaaaaaggtgtcctgccccatcatgccctgctccaatgccacagttcctgatggagaatgctgtcctcgctgttggcgtaagtttctcaaatggcatagctattcttcagtgactaggtcagttctacatacatcctagacagccgagcacaacactggaaccccacccccatctccatcatgcttccattcagtttcttgctgcagcagctggttaactgacagcttatctgctgtacagagccaaaactccattatgagtacatcgtaattacccatctggattgcagtaatggcagtgaagatcttggtatagctcattaattctgattttttgctttgaggaaaagagatgaagacgtggcagcaacagctctaagttgactgcttttagaatttgaccttagtggcacagagttaagaaaaatctgctcaccagagatattgacaggcttactgtgtaagcattggcctgatcgggcctggaagttttgcccctttcatctgtagggataagagggcctaagagaatagcagcaatctgagctctagagcaccaaaagaaataaggcacgatatcgttccatggcacgttatccctggcttttgttaccagtaaaatgaatgactttgctgagacaatacttagtgtagcaggtacaagttataaaagtgattcattacaactaagataaggaagaaaacaggaaaacagcacttgcccttcacacacacagaaacacacatgcacacacacacaaacacacccttgtcacagctcagaataaccaattccatccagggatcatattagcgatattggcactgtaatggtcgtttttacatttattttctgttccgcattcacttaacatgtgcgttaaaaggaacaaagctagctggaggtagcaaagttttgaacttgaatcagggattgctaagaaaacttacaactaatgaccacagaaagtaagttctttgtcttctgtctgatacagctagatgtgattgtagccgtggtgcctgggcagatggtaaacaaacatgctgtcctcttatgacaatatgtgcagagaaggccccaaacgctggggtgagaggaacaacaaactgactaactcacggccgagttggagccagaaccaacaacagctcggctgccttcacactcatctgtcaaacacatggtgtatggctcccctgacagaaatgactcctataagcttcctcatactcgcgcattcttggaagtctgagactggaaatgcctacccagatatgttaagtcagtaaaggaaaactcatttgcaatgctgagaggagaaagaaaatcaatgaataggagagcatacactgtgggaaggctcagctgtactgagccaggcaaagcatccgattaccccactgctgtacacatcatgacctgggataaacccctgggccgttggcctaagaaatatgttgcttttcatcctgtataactgcaactttgtgccggctcatattatgttctagagagctcatgtacaccatggtgaccatagttaataatactggattgtatgcttaaaatttgctaagagagtagatcttaagtcatcaccaaaaaaagtaactgtaagatgatggagatgtgttaattagcttgacggtggtaatcacaatatatgtgtatatcaaaacatcacattatacaccttaaatgtatataatatttgtcaattatacctcagtaaagccaaaaagaaataaatatattgcttttcaccctctggcaagtggagggccctgaacagagccctctaaagaacagcttgtcctaatcatcacgtacctgatgaacctctgtttcccctgcagccagcgactctgcggacgatggctggtctccatggtccgagtggacctcctgttctacgagctgtggcaatggaattcagcagcgcggccgctcctgcgatagcctcaacaaccgatgtgagggctcctcggtccagacacggacctgccacattcaggagtgtgacaagagatgtaagcatcttagcctctcagggacgtggagaactgacctgtccttgttgtcgtcaccaagggcagctccacagcatgtatattaagaacacgggttctaggatctctggatcccaatcccactgcttagctgtgcacccttgaacacaacttaccctctctgaggctctttcctcatttgcaacttggagataataatagttcttgataagtttatcttgagcattttatttagatactgcatgtaaagcagttagcactgagttttggtttatggtaagcaccctgtaaatgttaggatattaacagcaacccataaaaacagcgaacttatccgttctctggtagaaaacattccatgttgacatttgggcatgtggccaggagccaatttctaccgtacactgggtttagttgccattgaccatttcctggaaatacttctgcgtgctcctgatgggagcctctatttggctgtctctaagccaaaaccatttgtgaccatcaactctgtactttagttaaacaggatggtggctggagccactggtccccgtggtcatcttgttctgtgacatgtggtgatggtgtgatcacaaggatccggctctgcaactctcccagcccccagatgaacgggaaaccctgtgaaggcgaagcgcgggagaccaaagcctgcaagaaagacgcctgccccagtaagtgtgaggtccgctgcaagggtgagcatgggcagcagctctgcccagctggttgcctggcatctgcagcctgcagttcagtgggtcatagagcaggaaggttacctactagagaaacaaacagaagcaaagtcctgcaggctcagcaacttcttttaatgaaaaacaaactcaccctcttccccagcattctttccatgtgtcagagaagcagaggtttcttgaacgggcttaggagagtctatgacaagggagggatttgaaagttgatcttaattgttgcctgtggttcatcttcttacagtcaatggaggctggggtccttggtcaccatgggacatctgttctgtcacctgtggaggaggggtacagaaacgtagtcgtctctgcaacaaccccacaccccagtttggaggcaaggactgcgttggtgatgtaacagaaaaccagatctgcaacaagcaggactgtccaattggtgagccacgcagcccaggatgaaacgacccaggagctttgctcttttactgaatgctgcagtcagcattcgaggagattccagcttggttagtcctgagcgatttgattgctctaagatgcaggtggacaacataatcccaacaagttatcggttccctataccctataatatcttacactgtgttaagtgcccagcatggcagtatggcagcttagaccaaccatttactgtgactgtctctctctccttgtctcagatggatgcctgtccaatccctgctttgccggcgtgaagtgtactagctaccctgatggcagctggaaatgtggtgcttgtccccctggttacagtggaaatggcatccagtgcacagatgttgatgaggtgaggaactgatggggctccgagtttctggatctaggaaagcagctaacctgtgcagtcgcttccttatggcagtgacttctaaacatgatgcacgctcttatttcctccatagtgcaaagaagtgcctgatgcctgcttcaaccacaatggagagcaccggtgtgagaacacggaccccggctacaactgcctgccctgccccccacgcttcaccggctcacagcccttcggccagggtgtcgaacatgccacggccaacaaacaggtacagtcaactagacgagtaaaccagaggacaggagagctgtccttgaccaaaataactgggagcgggaggaatgtaatttcatacccttcaccaaaaaaaaaagggcgaggagatgaatgtacggtctagttttagaaacgtgattagaaaatccatggtaaatcctgcaggggaaaaacagtcttccatatttaaaaatgctgctctggaataagttgtgagcagatggacttgtaaacgcctaggtgctgagcaaattcaagaaaaataaacataaagcaaagtttgcttatagcctcagggagaatggggagggacagaggtaacccacactcttccaaatggagcctctgtctactcagagatgacagggatctggattcttgtttccatgatatctgaggattctcaaaagctctgtgtaacagcagcatggtgtaccctcaggtgtgcaagccccgtaacccctgcacggatgggacccacgactgcaacaagaacgccaagtgcaactacctgggccactatagcgaccccatgtaccgctgcgagtgcaagcctggctacgctggcaatggcatcatctgcggggaggacacagacctggatggctggcccaatgagaacctggtgtgcgtggccaatgcgacttaccactgcaaaaaggtagagccaggtcctttgtgtgcctccagaaagagggcccatcaccttatcaaaacacaggctaaggaattttaaatacttaaagtttggacatgaaactgaaagattaaatctcccaaagggagaggggcactaattcctattaaaattaaatcacttggtgccaaaaacatgaacagggctagctctttttgggcaactgtgttccatagtcaactcttctgtccaaaaaaaagttcagtactctatccaaataccagcaaagcatgacttgtgttcacaacatctataaagcctagagcatttacacaaattctgtatgtatatcccccaagaaaagttttattttcttgtcttcccataaaaaaaatatgctgttactgagccaaattctgttctttttctatttggaattccaggtacactccctcgtgcatgagctcagcatgaggaaggcaactgaagcagtgatatatatcttctctttcctaggataattgccccaaccttcccaactcagggcaggaagactatgacaaggatggaattggtgatgcctgtgatgatgacgatgacaatgataaaattccagatgacagggtaaaaacagttttctatccctttttcatcttttcagttcagcaacagcctgaaacactttgggattcaaggaaattacatggctatagcaaaaaatataccaaatcaatacacaggataattagaaattattcattgtgttccagtagtttaaggatgtagatgttgccaagagaatttttaaatgagggttttgtttttcatcagaactgtttttctctgtacttgagaaattataatgcataaacaaatgccactttgttccctagattcatttcaaatgtcacatcgaaattacagtaaaattgactttgggcacactatgaactgagatgatgggattatattctacatctcactaacttctaacccacagggatccatttttttaactatgtccttttaacttttgtagtgatcgttttacactgagtgatcaattagcctatccactaggtagaaagtattgctgattttcacagttttagacatattatgcacatggtttgaggcttgagctgttttcaaggacaacattgttaagtgctccatttcttctctttgcaggacaactgtccattccattacaacccagctcagtatgactatgacagagatgatgtgggagaccgctgtgacaactgtccctacaaccacaacccagatcaggcagacacagacaacaatggggaaggagacgcctgtgctgcagacattgatggagacggtaaggtgctgcctgatcagagggcccgcgggagacagggacatgcacagctttccaaacgtacttctgtctagtcctggctattagtatgcactttggtggaaacatccaaggctggagagcccagctcttatttgtcccttgttctcttcaggtatcctcaatgaacgggacaactgccagtacgtctacaatgtggaccagagagacactgatatggatggggttggagatcagtgtgacaattgccccttggaacacaatccggatcaggtaggtggatggactcctttcagagtctttcagtaaactgttggaatatccctttcatggcctttgaaaaatgagcttaacaaagttcaaacactttcattactgtggctccctggcttctcatagccaactggaatacgttcatgtaaataatttgcctgatgtgagctccttgcacagagtctcacagatctttagcatgaagatctggtaacttcagtcttaccttctgtaagaagggctactggacttgctcagcatcgtctaccattgttaagacaaattatacaaagcagacatctgtgactgacaactgtacaataatattaatcatatgtaatactaagagatggaaaaataaatgtgcataagcaaaataaccattttcatggctaatgatgtaatctagctataagaaaatcatcaaactaaggatacatccaaaaccaaagtaatttatccctgtcataaacattacccagacagtatacaacacagggaccagtggtctgtttccatcttttcaggacttttcagagaagtcgacgtgtcaacagttttacaactgaaaccttctaaggaaattctctgttataaagtatccagaaaatttcatttaacattaagatgtaaacagttaacatttcatttcatctttagtaattaaatatcactctatttgaccttatttagaaagttttatatgtaaaacatttttaaattatcccttctcagatttttatacgaaaacaaagataaaggaaaaaaacttttaaaatgtaattgctactattgctatctttctgcaggagtgtgtaaatagacatgacaccccactggctgtatcaaacaatggagaattttccctgtggtgggggcataagttatctttaacatgaatggtttatactgcaatttaccctccatttacatctctctttcagctggactctgactcagaccgcattggagatacctgtgacaacaatcaggatattgatgaagatggccaccagaacaatctggacaactgtccctatgtgcccaatgccaaccaggctgaccatgacaaagatggcaagggagatgcctgtgaccacgatgatgacaacgatggcattcctgatgacaaggacaactgcagactcgtgcccaatcccgaccagaaggactctgacggtgagtcatgggagccactttctaagacagggactgctggcacagctgtgtagattgaagaaatgaaaccaaggctcaaagcatttgacaggatgaagggaccaaatgccaacttagacaagatagtgacatttctgacaccagtaataataatagcactttagaattttgctgaactcttgcttttttgacctcaggcgatggtcgaggtgatgcctgcaaagatgattttgaccatgacagtgtgccagacatcgatgacatctgtcctgagaatgttgacatcagtgagaccgatttccgccgattccagatgattcctctggaccccaaagggacatcccaaaatgaccctaactgggttgtacgccatcagggtaaagaactcgtccagactgtcaactgtgatcctggactcgctgtaggtgagtagcgagttcttagatcctaagagactgatgcatacatggggaaaaacaaatataaaacctggcagttgtacctatccctgtgggtgctgaggatgtctaggaacatgatggagaaccttctgaaggctgcaggttttaacctggctctgggctcttcttccaggttatgatgagtttaatgctgtggacttcagtggcaccttcttcatcaacaccgaaagggacgatgactatgctggatttgtctttggctaccagtccagcagccgcttttatgttgtgatgtggaagcaagtcacccagtcctactgggacaccaaccccacgagggctcagggatactcgggcctttctgtgaaagttgtaaactccaccacagggcctggcgagcacctgcggaacgccctgtggcacacaggaaacacccctggccaggtaagaagcaaagccctggaacagagagagagcttatgggtgcctgactagcactggggatgctgtgctttgaccaagactctgaccagggagtcttagaaagttcccagcatcaccagctgcagcattgaactctgctttgtaaaaacataatagtgttgaaaagggagcttgaccaagaattgccctgcaaatcctaaggtgccttcagccttttcaaacaaaaaaacctccttccctcctctctgtctgctttatatgtgtgctcagtggcacacaacaaatatgagaggacttggaaaaattccccattgcagccctctaacttagatcagctcagtacctttcaagcattgtttctgatggaatgaaatagaaatctttacctgaaggagctgtgtttcaacctttccttttccttttccttcaggtgcgcaccctgtggcatgaccctcgtcacataggctggaaagatttcaccgcctacagatggcgtctcagccacaggccaaagacgggtttcattaggtacgatcatactgattcactttcacttacagtcacactgagggacaaaaagacaaaaagtattaaatagcattgtcactaaacaagattttttttccctgcagagtggtgatgtatgaagggaagaaaatcatggctgactcaggacccatctatgataaaacctatgctggtggtagactagggttgtttgtcttctctcaagaaatggtgttcttctctgacctgaaatacgaatgtagaggtaagagcaacatcaccatgaatgtacactggacatctctatttcagactaatatcaaggatgacggttatgggggagtccagtgtaaagactgttttggagacagggttatttctattttgcttttgaggacacaaggacaaaaatggaataatgcctaggcactgtggcttatgagttcctgagtccttagctataatattagtttgcttagcaatctctgtgctcctcatacacagtgcaaaggtaagctgcagaaaagctcctatataatttggacttcattaataatactgttctttacaattatatatttatatatcttactgcttattgttttatgcatgccatcacagcacgagttagcattcccaacttttccctgtatacaaagaagggagaggaatgttgctttcatattggcatgttaaattaatgttcactattaaacttagcattttttttcctcattcttttttacttagtcattacttaagctcgctgagtccaacactggctctaccacaaaataagtgcttaatatatatttactgggccaaggccagatacctaaaagatcaatgacagtagagaaagatggttgattttactcaaaaaaatctaaattattaatgtaatttttgagtccaaatttttaaaataagactccctaaactgttaacattgaaagcctttggaaagcataatatatgttctggaaggttcacgctgtgtcggtctcctagcatcaatgtcagctaataaaattaaatgctaatgtgcttgaacaaccttaaaattaggcttttgtcattagaaaagtagagctattcctatgtggttaacttattaactaagatgtctatgcttttatgaattagttttcatttgtatatttatttatatttgtttatttaacagatccctaatcatcaaattgttgattgaaagactgatcataaaccaatgctggtattgcaccttctggaactatgggcttgagaaaacccccaggatcacttctccttggcttccttcttttctgtgcttgcatcagtgtggactcctagaacgtgcgacctgcctcaagaaaatgcagttttcaaaaacagactcagcattcagcctccaatgaataagacatcttccaagcatataaacaattgctttggtttccttttgaaaaagcatctacttgcttcagttgggaaggtgcccattccactctgcctttgtcacagagcagggtgctattgtgaggccatctctgagcagtggactcaaaagcattttcaggcatgtcagagaagggaggactcactagaattagcaaacaaaaccaccctgacatcctccttcaggaacacggggagcagaggccaaagcactaaggggagggcgcatacccgagacgattgtatgaagaaaatatggaggaactgttacatgttcggtactaagtcattttcaggggattgaaagactattgctggatttcatgatgctgactggcgttagctgattaacccatgtaaataggcacttaaatagaagcaggaaagggagacaaagactggcttctggacttcctccctgatccccacccttactcatcacctgcagtggccagaattagggaatcagaatcaaaccagtgtaaggcagtgctggctgccattgcctggtcacattgaaattggtggcttcattctagatgtagcttgtgcagatgtagcaggaaaataggaaaacctaccatctcagtgagcaccagctgcctcccaaaggaggggcagccgtgcttatatttttatggttacaatggcacaaaattattatcaacctaactaaaacattccttttctcttttttcctgaattatcatggagttttctaattctctcttttggaatgtagattttttttaaatgctttacgatgtaaaatatttattttttacttattctggaagatctggctgaaggattattcatggaacaggaagaagcgtaaagactatccatgtcatctttgttgagagtcttcgtgactgtaagattgtaaatacagattatttattaactctgttctgcctggaaatttaggcttcatacggaaagtgtttgagagcaagtagttgacatttatcagcaaatctcttgcaagaacagcacaaggaaaatcagtctaataagctgctctgccccttgtgctcagagtggatgttatgggattctttttttctctgttttatcttttcaagtggaattagttggttatccatttgcaaatgttttaaattgcaaagaaagccatgaggtcttcaatactgttttaccccatcccttgtgcatatttccagggagaaggaaagcatatacacttttttctttcatttttccaaaagagaaaaaaatgacaaaaggtgaaacttacatacaaatattacctcatttgttgtgtgactgagtaaagaatttttggatcaagcggaaagagtttaagtgtctaacaaacttaaagctactgtagtacctaaaaagtcagtgttgtacatagcataaaaactctgcagagaagtattcccaataaggaaatagcattgaaatgttaaatacaatttctgaaagttatgttttttttctatcatctggtataccattgctttatttttataaattattttctcattgccattggaatagatatctcagattgtgtagatatgctatttaaataatttatcaggaaatactgcctgtagagttagtatttctatttttatataatgtttgcacactgaattgaagaattgttggttttttcttttttttgttttgtttttttttttttttttttttgcttttgacctcccatttttactatttgccaatacctttttctaggaatgtgcttttttttgtacacatttttatccattttacattctaaagcagtgtaagttgtatattactgtttcttatgtacaaggaacaacaataaatcatatggaaatttatatttatacttactgtatccatgcttatttgttctctactggctttatgtcatgaagtatatgcgtaaataccattcataaatcaatatagcatatacaaaaataaattacagtaagtcatagcaacattcacagtttgtatgtgattgagaaagactgagttgctcaggcctaggcttagaatttgctgcgtttgtggaataaaagaacaaaatgatacattagcctgccatatcaaaaacatataaaagagaaattatccctaagtcaagggcccccataagaataaaatttcttattaaggtcattagatgtcattgaatccttttcaaagtgcagtatgaaaacaaagggaaaaacactgaagcacacgcaactctcacagcgacattttctgacccacgaatgatgccttgggtgggcaacacgattgcatgttgtggagacacttcggaagtaaatgtggatgagggaggagctgtccttgcaatgttgagccaagcattacagatacctcctcttgaagaaggaataataagtttaatcaaaaaagaagactaaaaaatgtaaaatttggaaggaatccataaatgcgtgtgtgtctaaatacaaattatcatgtgaagaaaaggcccaagtgtaccaataagcagaccttgatttttggatgggctaattatgaatgtggaatactgaccagttaatttccagttttaatgaaaacagatcaaagaagaaattttatgagtaggttaaaggtctggctttgaggtctattaaacactagaaaggactggctgggtgagataaaatcttccttgttgattttcactctcattctataaatactcatctttctgagtagccatgatcacatacaaatgtaaattgccaaatcattttatagtaccaaggtgaagaagcaggaactagaaagtgttgataatagctgtggagttaggaaaactgatgtgaaggaaataattctttgaaatggcaaagaattaaataccatcattcattatcagaagagttcaacgtttgaagtgctgggagataattctaattcattcttggatagtgaagcaaaactgattgaaaataccaagataagacagaaaaagtgactggaaagaggagcttttcttccaggcatgttccagtttcaccctaagactgaccttcaaataatcaggttgtactgaaataaaggacttgttaaaaattaaaattatgtcatcgagatgatagcttttttcctcctccaacagtttattgtcatgtgttgtgggagagctcgagtgaagagcaataaactccaggtcttataagaatgtacatacaataaaggtggtgccagcagtttttttttttctaaagagtcacatgtagaaaagcctccagtattaagctcctgaattcattccttaaataaattggctctctctctcttctataatttctttttctttttatttttgagatgaagtcttgctctgtcgcccaggctggagtgcagtgacacaatctcggctcactgcaacctctgcctccccggttcaagcaattctccctcctgcctcagcctcccaagtagctgggactacaagcgcccgccaccaagcctggctaattctgtatttttagtaaagacggggtttcaccttgttccggacaaacactaagccctaaagggaaatccaaaataaaaacatctatttttaataacactttctatctaaatcagggtgactttttaaaaaaaatccggaagctttttgttgaattacgttacagacttagttaccagtccttgttagagttaccttcagttgacatgctgtgaatggtcccacctcttttatggcagaattcattacttaaaataactctattttcttcccccttacctaaataacagaaaggctcactatgtcccaaatatcattggcagaagcaaactataaagtcataagccctttgcagtgcaagtctagaaataattttactctgtgtttctttctgtctccctcttccctcccctttttccttcctaccctcccctcccctccctcctccttctttctctctctctctctctctctcatacatacaaacatcaaataccagaaaagcatagatttagaaagctgaactcctctgaaacgctgacggacaacactggcccctctctgccccacaacaaattctcacccatatcacctttgccctctgattcttcccacccaaaccctaaaacacagagtgtgcctcatggcattcctatgagaatctaaaatcacaacttttaacttatacttccatcccacagcaaaactcttggcatcaagataaattatacgtagcacattgacatcagcatgaacaattgctattttaaatgaacaaatagtaaactgaaatagtgtctggaaaaagaaactgcctatcaatacctctgaaaatagtagctatagaattcctcattttaaaaagtcaaggaaattccatataaacaatcattaatgttattcagtatcagtggatgaacatgtgccagcaaaaacaatgttatgtatacatcactcaaattttattaaaggcagc

SEQ ID NO: 34 - DNA, 112039 bp, Homo sapiens
ctgttactcaggaaaattatcaaatattctactcagagatacttggaaagactgaaggaaaggaagaacgaagaaagcagaatctagacttatgtggggagagatttgtggcagaggaaaagtattctctttgaatccgacaagggatttgcctgggggaatttcctgtccagccttttattaccagggtcttttgaagccgggctccccattgggcagttccctgggagtgcagtggggaattcttacactttccctctaggtccccgaaggatctcgttttctcagtgtctctttcaggttggcaggagccttgagcctgacacttccctttgatgggacaggcaagctctgtgggcgcgtaaacacgctgtaaccaagttctttgctgattttacagttttgtgtgctcccgagaagaagtgatcgtactcaattgtctattgctggcctgccccctaagagcctgggggctcctttcccctaacccagaactagctgcacggggggcggggaaatgggggtggggaaggagtgggagggcagtggtttccgcgagcagagcgatgttactgagtgagtccctgaatggggagcgctgctgtccccaagccgattggtacttcttgtcaggaagaaacgccaagaggtgggagtgcctggggagggaggcaggcggtccctaccgcaggcgcggggagctgcctttccgcccctccgcctgctttccaagcctggactcttaggagtggctgaagctgcggagcgcttttggagcctgtgaatgaaccctcctcctctccctcctccttcttctcgctgagtctcctcctcggctctgacggtacagtgatataatgatgatgggtgtcacaacccgcatttgaacttgcaggcgagctgccccgagcctttctggggaagaactccaggcgtgcggacgcaacagccgagaacattaggtgttgtggacaggagctgggaccaagatcttcggccagccccgcatcctcccgcatcttccagcaccgtcccgcaccctccgcatccttccccgggccaccacgcttcctatgtgacccgcctgggcaacgccgaacccagtcgcgcagcgctgcagtgaattttccccccaaactgcaataagccgccttccaaggtaatcacgtttcttttgttccccccttaaaaaacaaaaacaaaaaacttatagaaaaaaacccgcgagcttagaaaaaagaagcaattggtagaaggctttaattaaggcaaagagctgtaaggcgaagttaagaaaatgtaggcacttaaaaaatgcaggtaactttcataagggcttttggggagaggcatacagagggaccttggtgttgaaaaagattcagacaaaagaaacccagggtggggtggggggtaaaatgactaacggaattgggggaagggagggaataaattgtaaagaaatcatagaaaagtggtgggttcttgagctggagagaagagagggacctttggcactttgatttttttgttgttgttgttcttaacacgctcgaggcaaaagtttgaatggggactaccaagacttgccacagacaagtccccgaagccgccttggtgcaggccacctggtttcccagcccctggtgtgtggtcagtgcctggtgttcctggaaagccactcccgggcagctcctgacagtgcgacccggcgcccaagcagcctgggaccttgcgcggacctgaccccttcagaccgcaggcagtctgggaggaggtccggccgggggaggtgcaggatccccgccgtgtctctttgacgacttggggactgtcacggttctctcccggcgcccctgggttcttttgtcctgcacgcggtgcgaaggggccagcagggaaggagcagaggatggggggtggggttgttggagccccgcggaggtctgggaggcccctgggcgggaaaagcctgttctgaatcggcagggatgtgcaacaatttttctcaccctgaagagtgaaatagggtctgtcgctcccatctcaacaagcaaaccggcacccagagcgcactgcagacaaaggtggctcggggacccgaatcaggggcctctgggtcagtcctctcgcccagactacaggagtcctccgtttccttacatattccccaccctctcctagttctccgctctagttgagcaactttactggcaggtctagcggcagcggcgcgcgcgtgtgccgggagccccgggggacgtcctcggctggagcgccccaccgtcctgcagaggcgtgggcgctgtagggcgacatccctggtgcgtgcagacctagggcatccgggttgttctggcccgcggtctgtgtcactgggcgtggagcggtctgggtgttaggcagaggagagcggggtagaaaaatagtgtcatagcctaaactatttgctctccaatccaactgcgtctcggcaagtcctgcatgtccctgggagatgctgcgggaagggggagaaatctacacggcgcctggagagttgtcctgccgcgcgcacacccgcggcagagtctctctgggtcgcgttcctcatctttgtgtctccctctgtctccatcttctctgcctcccttcccctctcccagcctctgttctctctctctagcttctgcgtcccctcccccacagctgacaaatgaatggctagtgtgaaatccctgcctttcccgtgctccaaggcagcagggagggaggagcgagggaggcggtgcgctccttcggatctgcccccagttcagctcacaagacttgcagaacctagatgtctaggaattgggagttttgcggcgggtgtgggcgccccctgatggagaagtcccgcacaggcggagaaaaacaagccccccagaccaagcgagcatctttcacaaccttgtgttcaaggatggaaggccctagttttcccttaagtcattcattttgcactccacaatctgcggcgtacatctaggagtttggaggaccctgaaaaaaggtcttggtctgtgcaaagtgcagagatgccttctcgcgagtcggctggaacgcacgcggcgccctgggtccagttcgccgcttagtggacgaacgcacatggccagggtggagccaggtttcggaggtctagacgcgccaccctgggcgtctttaagaaagataatacacataccgtgctctcaaaacccatgaccacttgaacccaacgctagggccccgccccaggatattgcaaaagaagggctcctaatccaaaacttaaacttcctcaacttcagggcgggcgtcggacgggaaagtggagagaaggcgggcagtgggaggaaaaaagaaagggaaggaagggaagtggaaggaaagaggaccgtggaggggaggaaaaggagaaaggaacggagatggggcagatggcattcaaacagccaggaacggaccggaagggttcgtttcggggtttgggtctgaatttcgagactcgttttaggatactcttttccctttcccagcggcaacaaatgtgactgcagaggcgtgccgggatggaagggtgggaaagaactagacaagcggaggtggtccagccccgcccaaaggggctgggtctggggcccgcccccactcgctcacctcgcgccaagggaggacccgcaacgggcgctccccgcagcggctgggttagccagccgccacgtgggttggcgcttcggctcccagccgagacgggtgtgacttcctgggctcagagactgcagtacagccgcacaggcggccggcgcagccgaggcccccacccaccgaggccaatgggggcggggcggggaaggcagggcccagcttaaccgagagagccgagtggcctcgcccccaggattcggggccggctgcttctggagctgacccgagttccatccagacagcgctgaacactcttattaaaaggctatttaagttttattttattttattttatttttgcttgcttcttgggagtggtaggaggggcatcgtgcttttgttttgaggcaggggagaggttaaaatttactccaagcaaactttttgtcagaaaaatgagactttataccgtattccatttgttgactttttaaatacattcaggtcactctaaagcccattcttagtcaattaacagattaatttcgttccagactgtcataaagagttcgcctggaatggcaaatactgccattcgacaagactaatagaatttcatgggggcaaacatggaagggctgcgagtgtaactgaggttcctgtgcctcaatgaggaaccttagcggggacctggcggggactggaagctcagcacctatttagggagtgactgagctggaaacctggagaagcttggtgcagacgagacggtgcttcttagagctgcattttaagtcctcccattttgctgcatattggaagaactggattttaaagatcttttccatcacctcagattctgtagctaacagccacgtctttttctttttgtctgctgaaagctgtgacctaattgttttaagcacttcttgacaatttcgccaaacccatcctgaaaatattcacataaagtcctaaaataggatgttgtgagtgtaatataaaaataggaaggtaccaatggaagcaacaattagtgttctgagatagaagcggttcccagtttgtaacttggaaatgttaagagcagtacatcagggagaaggtctccaagagtctgacttcttgttctgagctctgagtaaagaaagaaatatgttagaattgtattgtctgcccgcagtaatattgtaaagggttccaatggattccaatgtgattgagcaattacttcctccagcaccaagtccacagtccttaatcttcttgtgagaagattaggtaggaagcgggatgagattcaagacaatcatttaggatttatgtcagaattcaaagttttgattcttttggtagataaaaacagagttggttttaaattgtatttcctgctttcaaaaaaacgaggtttgaaaggaatccccctagatttacataggtttacagatgtaagtttcttctttttccctgtgtttgcaaactggagggagatgcctttgatattccagaatacctgtatctatacacttgtaaattctgctaggaaaggacctaaacagctaaaccaaaggtgaccatgattaatgttaaagatactacccattgttctctcttttgttgtattattaggcttaaatactttggagttaatgattggtcacttaattgagtaacagagcctttgagagcgcaaagatcaactaactctgtctcccaaagtctggcaactaagccctcctttcctggtgagatttaaacatttttgttgacgtcattcatggacaaacatcggtaaacactgtatttaaaatgggatattgccctgtgatggagcagaacttctcaagacacatggttcttttgaaagaaagaattaatgactgtagtaaggtattttttcaccacccacgtagagaaaccagttaggactgacaaacactcattgttgggagttacttgctctggtctgagaaaatatgctgattgttacataggtctgtattttaccagaaaacacaaagcatgtactctccctgatttggaatcagaaaagggggattagatatggatgtcttggccaagctccatttcaattagtgaatttttgccagtttcctcttgtagcctagacttggtaaattacatatatataaagtctgtgtgtgtgtggggggtgcgtgtgtgtgtgtatgtatacagggtttttaaacactgctaagttcttaccattgaatgtgttagaggtggttgtatttcagaggtcagtacagagaatctttgtttaatgtgtcagttctgtttcctgaaacacacctctgggtagatttaccaactataaaaggatacaaatgtatatactttccacatctgtatacatcctacctcattcttctaaggattttaagaggtgtttatgtctataaaatgagattacatattttacaataaacatatttgataaattataatctttttattattaaattattgatttgatattacttgaggtatagtggaatgagcactagacttggaatcagaaagtttgagttggactcactagctgagaaaaccaagcaaagatattacttttggacctttagtgtcataatctattaaatgaatatgcagttataaagatcaaaagagtaagtactttgaaaaactatacaaaaaagggatgataatatattatgtcttgggattcatattgatctaattctataattttaataataactgcattacccaagccatgtagtttctactgaatctataaaataaatcagagaggggcatattgttttaaaaattgtttagtttcattaatcagaagacaggttacagaaattgactccaatgaagttggacattcagtggaaaggaagaattattcaataaatggtttcaggacaattgatgggtccatgcaaaataagaatcagtctctacctgatttctcatcctaaaagaaatataagatgaatcaaatatgaaatgtagggaataactttttacaaaatgataaaagaaaatcatgggattaaaaaaaataagttaggaatagagaaacctgttctaagcaaaacataaaacccagtgccattctaggaaatactgataggtctgactaagtaaaaattacacaaaagcaaataatatatttggaaaacatctacgacatttgagagacaaaaagctaataactcttgatattccatggacttttatgaataactttgaaaagtccacatctatcaaaatatgagcaaaaattatgtacaggtagtggcagaaagagacatagagttttaaaattatagaaaaaatcgctcagcctcatctgtaattaaataaatagtaattaaaacaccaatgatatgctacaccattttttcaccaatcagaggagtaacaaaaaaaaataatttttttctttttttttttttttgagatggagtctgttactcaggttggagtgcagtggcacgatctcagctcactgcaacctccgccttccaggttcaagcaattctcctgtgtcagcctccctagtagctgggattatgggcacccaccaccatgcttggctaattttcgtgtttttagtagagtggggtttcaccatgttggccatggcagttgatcttgaactcctgacctcaagtgattcacccacctcagcctcccaaagtgctgggattacaggcatgagccactgtgcctggcaaaaataaaattaaaaagtttgatgcaagtttgtgttggccaggttgtggagaaactgggtctctcatatactgttgtatgaaagtaaataggttcctctacttcaaaaaataatttggcaatcacttttttttgattctttatcaaaagtttttaaaagatgtatatactctttgattcagcaattccacttctcgacattattatatggatggatattggtaccaatatcacccaagacaaatggacaaggatgttctttgcagcattgcttctaagagcaaatatctggaaacagtgtaaaggctcatcatagggaaccatttaaataaaagttgctgtatccacctaatggaaaactatgcagctgtcaaaaataacatggaaaaattgtatttgctgatttggaacattctccaaaatatattgtattctaagtgaaaaaattgatagataaaactgagtatatattatacatctaattatgtaaaatgggtgtatattcattcttttaacaaatatttactgagtgttctaggcattgtggatacaggagtgaacaaaacatcaaagactgctctgttggaacttttactatggtaggtagagaaaggcaattcccaatcacatatgcaaaatggtgatatgtgctaggatgaaaatagagcatgggaaagggaatagagtacagtatgtcttaggtagagtaatgagaaaggagttcaccaggcagagaacagaggagtgctaaggggcgacaatgtgaaaaagcttagccaagtccaggttcaggaattcacatgatgctattacttgtatgaagtaaattcatgaaatttcacacctaaatcacgtgatttctctctgctgtacaatgattctttctgtgagaaagaaccagtgagcaatatgatatgtgatgctcattacatccactttgtagctgaagtatcctagaaagttggttgtctagggtacctaattagcagaatggtggacaaaaccaccgtgtctctgtccttaagtcaccccttgtcagctgagcttccccaaaatcaagggagaatactaaatatctatttaatagaatcttggctttctctcggaggctgcccatccctggtgtgtcccttatcctccctgcagacatttctcatggataggagttccattgaccttgtcttttatgtctcccaggcaattaaacagtctcagtaccctgtacctggattgttcaatgactttcttcccttctcattgacttcactggagtagaaggctaaatataggcattcactctcatatctctcaggtctttccatgcagacagagttgttatcactagtagacggtgcttataagagagacatggaaaagtggaagaatggaaatagggatttggagtggtgctaaaaacaaagaaagaggcttctgaaagctttccatttaatatgatcaaacatagaagacaaaagatgtaacttaatgaccaaggatagggacatagccttgagaaaattacagaagtggaatgaacgtcttggactccaaagaagagggaatggaaatgtagttctgaggcagctaaagtcaataaagccctctgatatatttactgtagaaataaatgatcatcttttaattcaaggtttgcaaacttaggtgactacaggggcgaggcatggagtggaaatgggtaagagactaagtgggggcagtaatggccttgagcacacagacttaaggggagagactgctgcttggttaatgctcatgatcagccagctgaaatatagacttagtgttgctagaccttctgattttttgaaagaagttagagatcttatatttagtgtaaacagtctaatttttaaattgagtaacttattcaaacatatttatgcaacttattcaaatgtatttagagcatgtctgatctcctccttgtattcttacctagtcttaggggtaatcttaaggaaagtgatgcgtatacttgttgtacctatgtagatggaggaccattctcctctccccaacaaaagacacttttataaggattgagtgtggcacaaagagttcgatttttagtatttaaattgagtaggaaactcaaatacagaagatcctttcctgggtcacacctttggtttttttaaatgagatttgactctctagatattgacaaacatcatattattgggtcatggtaaatcttcaagtggactgattcaaaagtgttcaaaagtatttcaggtgttaaggaattgttggcacggagtttcaaaggtgtttctgcataagaaatagaggcgttgatcatgtatttgatctacaaacattcctcaaggatataccctgaacctggcaatgaagaaatattgtgggaattattaagttgaataaagtactagctctgccttccagaagcctactgttctacagaggagattagacatgtttacagataatttgaagtacatagcaataaattataggatgatttattccaagcataaagtgtatattgctactatagtggtaacctaggttataattttcaaatgtaagagccccaaatactattctttttactcttagtgatatgaaactatgttagaacatctgcagaaagtctgaattagtaattttaataataaatattgagtactgatatattgtatatcactgagatttattttatatacattattttatcaattcctatgatcacttcggtaagtactaattttcacaactaagtagtgacagaaaatgaggtttagagagatatagtattttacccaaagtcacagaatataagtagagaatgcagaacttgcattctgggctatttgacagtggagcccagacttttaaaattaggcttataaagatttcctggaaaaaaagaaaaataaaaaatagagaacaaattttcctgaagaaaagtaggaaattattatttataagtataattaaagagagatctttaatttcttttttttttttttttttgagacggagtctcgctctgtcgcccaggcgcaatctcagctcactgcaacctccacctcccgggttcatgccataaagaaaggtttcttatttggattcagctaatactcatggaatgcattttctttaacacctttttatcataaaatacaatcttttactttggctgtgcaattgatacctttatttttccttaaaatattgtaatagcatagatatatggtatatacttcctgcttgctgtgctgtcttataagaaatccagaaacatagaaacattatggcatttcccagttagtgtttaacaaagtctattagcagatcctagtgattataggataaataacaaacttaattatcagggttaatttaggattatcaaccatatgtttttcattgtgaattatcagttggtctatagatggaaaatataagatgtataatgtattagcttaaaaaatgctcttcagagagtgtctagaattatagaatttaaaaattttgttttgaaaaggtctaattcttatttcaaaatatataaagaaatcaaatgcaaaaaaattaagagaaaaggtcttaattaattaaatgctgtacaactccaagccctatttatgttcaagatcagttttgtaatttatgactaatttcagcattagcttgttttcaatctaggtttgctaaataatatagaatttcttttccaatgaagtttttcagggtcccagctgaaaaatatataccagttaggatgctttcaactgtaaggaacaaaaagtcacgattttattgggtttaaacaataatgacatttataatctcatataaaatgaagttcaaaggcatggtccactctaggtctaatccttaaggacttacgccttgcctttgctgattctttctcagcttcatttccagaggtatctcacttactcatggatgcaaaatccctacaacagttccagcagaaagattccagcatgataatgtccagggaagaaaactgaccacctcttcctttgttctcttctcaggatgaatctatctttcccagggacccttcactggaggaagagatcccctcacatctcactggccaaaactatattatatactgttccaaatccaatcattggaaaagggaatggtacctctataattgacttaggatatcaagatcatcccttgggctggggtttgacccaggattctccaaagtatgtgactgagggtaggcactagaatggaaccagagttgtgttagaaaggagaaacgcatggctattatagaatagttctaaatgctaccgaggagggcacaactgtaaaaaccaaataatcttttgccattcttttgaagttggcactttgatttctagatggttccccaacacaggttcttctcctcctcatcattatagctgccttgaaatttgagctggaagggaacattctgagacccagattgttaaatgtcttttccaaagtcatgcaataaattaaatggcaaagccagggcagtttcttgactcagtacagggtattttctttcattctttactcttgagacgttagaactgttggtactgctttaaaattcatggcaagaactggtcacttttgtaattaacacctccttataatacatttgttttgtttgcttagccagctagaaactacatggagtctgtgctttaaaaagcctgccgaagtccttattctctgttttggtattatgtgcatgaaccaccaattggttccttctcaccttacacttgatgaagatgtctttctttcaacatctttctctattgctccccatcttctcttgctctatttatgatcagctgtctgtttctaaatagactttgtggtcacccatttctttttgtgccagctcctatccactagttacttgaactgtggtctctgttgttcttcatacagcctactcacttgtggttgtcacacacatccacattgttatatgttcccaaactgtattctggaatgattttggtaatggctgcattggatgagattcaaactaataattaaagcattgagatagcttctgctattacaagtttactcctgtttttatagtccaagaggagctacttcttctactcttattacttaatgcttaatactacccttattacatacaatgcacaaaaagcatgtgatttatgacccactttaaacctgaatgcttgtgatttactttgtgtttttcttcatttctaggccaagatgttcataaatataaagagcatcttatggatgtgttcaaccttaatagtaacccatgcgctacataaaggtgagtgtgctaacaatttctttggtgttaattgaaataaaaatgtaagtgctggaggatgaaatggcaatgtggaatcactggaataaaagattgatttttaaaatctattaagtgctgaaaactatcagttaaaatattattggaccaaaaacattagttttaaataaataagtcaaaacaaaataataagtaggatgctaaagatgcaagtgagcttttagtaacttccctgattactttcaggctttgcaaaaaagctcatatatggtattgggcatattttaaaattctaacactatttctcaaaaactttcctatgcaaaaaaagaaacactattaaacacccagtgggctagaatttgaaaagaattgagaagataaagagaaagctgacagccatgtttttgcccttagttccttttcttttcttttttaaaaaagcagttggatatgcatatgccctagttttttaatttgaaattttatattcttccaatgagggctctataattccaaatttattatttaatatattcaaggaatttgaagaaagatgctatccaagagtttcactcatctgcttctgtctgtctagtgtacctctccagactcagattccatttcttcctcacacttatattatgcatcagactcaccttttatgattttccagatgaattccttttgctaaagtttaagtcatccatctattcattacccctccatccatccatcatctatctattcatccatccatacctccagccatccattcatctgtccaaaatctttccatctgtttgcttatcaacatctatccgtgtattcatccatccatccatccttccatctgtccaaaatctttccatctgtttgcttatcaacatctatccatgtattcatccatccatccatccttccatccatccatccatccatccatccatccatccatccatccattcatccatccatttttcccactcacccattcatctgttcacccattgatgatattttttgaataccttctttgtgccagatattattctgggtgtctgggaatatacccatggatgactcataactggcctatcgttctttaaacttacttctctagttatgggagaccagcaataaacaagtaaacaaacaatccaggtactttcaaattgatgaacataaaacagagtgacatcatagagagtggcttgagttgggggaagttgataagacctccttgagaaagtgaaatttaaagtgagatgagaatgataatgaggaaccagccagccaagacctgtctgtaagttaggaagaaacatcgtgtgtttgaatagcagaaaggtcactatagttggagagcagtgatcaaggggaaagtaggagacatgaacagagagattagcagaaaccagctcatctaaataataataacacccaaaacttgaatagaactccctatgatccaggaactgttttaagtgcttaacactaactcactgaaacatccattacccctgtattctattgaggaaactgtggtaccaagagaggctaagcagcttgctcgaacgcccatacccagtaagaagcaaagcttggagatgaaccaattcataggagtgtgtgctctttaccaccatgttatacttcttatctacatggaacactgtaggctttaaaaagtctagaatttttactcaggaggctgagacaggagaattgtttgaacccgggaggtggaggttgtggtgagccgggattgcatcattgcactctagcctgggcaacaagagctaaactccatgtcaaaaaaaaaaaaaaaaagtctagattttattccaagtgcagtaggaagtattgaagggtttcagcaaagaaagatatgagttgatgaatgttttgaaaattcagtttttgataatctatgcagatttgattgtaggaaagcaagggtagcagcagagatatcatttaggaggttattgtagtagcctgtgcatgaaatggggtggggagtagtttagatcaggtagcagtggagatgaagagaagtgaattggatatgtggagatggaggagtcagtccatccactgatggattggatggggtgtgtagtgaggacatgagaggagtcaagaataaattgactcctgggatggctctctttccccttttcacctccagattcccctttctaaccaatttaaaagctcctccttgggtgggtgcagtggatcatgcctgtaatcccaggactttgggaggccaaggtcggaggagtgattgagcccagtagttcaagaccagtctgggcaacacagtgagaccctatctctacaaacattttaaaaaattagccgggggtggtggcttgggcctgtagtagcttgggcctgtagtagcccagtagctggaactccacctactgggagggctgaggcaggagaattgttgatcacagggggtcgaggctgcagtgagtcatgatcgcaccactgcactccagcctggatgtcaaagtgagatcctatctcaataactggtaaataaataaataaataaattcctcctccatgttccccttgtcccctgtgctgttgcagatataataacatcttccatgctcttgggataagttattgtttttcttcccaagtaggctactataagctgcaaaaaggcctttcatcttctagcaaagtgcctgacacactgacagcacttagtcattttgtgtgttgactaaatgagtgaataaataaataaatgccacagtggaccacctggatagtttttagagtctaggttccaccaattggatcatgaagacatgctaatcagatggtgaagcctaggagctgtcttcctcaaagtttttgggaggtgaaggtgaaggtcacagagaggaaaggacaacagcaaccagtgaagatggagaaagggatatgaaaaggggagtggtatttggatgggctgtattggaagggaatttacagggaaagtagtaggcgaccatccttcagctgaaatttagactttccacttaaagaaagaactcatgcaatgaaaaacaacttgtgttgtacctcctttacagtatttacaacaataattttgatagccaacaacattgagtaatttctgcatgtctttacctattctttgtaaatccatgatcactattattagatgtaattagtttggggctaatttcaggagaatttttttatatcagaggtgaaagttacaaatatacgatccacataaaacagattttctggatttatagtggaaaacacagtagtaacttgttgagtcaagacaagtactttcatcttaaggtttttttctgtttattcccagtcactgatgaggtcaacgactaacataaatgaacaccttgtctattgttatgggctttattttaacccaagaagaactatttcctttaacaatacacattatattatcttacaaactgtcctaatcgttgattatctaccattggcctagttattttgatgttccccttatagtaggaaaaggagtcatgcacagtcgtgaataagtgaatgaactagatagtgatatttgtcacttgaaagagtgataaattcccatattctcaatttgacatttatttggccaaggtctgtgtgtgtgtgtttgctcaaattgtgcagatggaatttacatcatctttactctaaggaatctgctgacagagaatgaggggtaattggttattcattatttagtgatttctccctcactgtactcatttggaccacaaaccatctggtaacagccaatgttttgttaggattcatttttattacttgaattgtcagcatttcagacaaattcctgtaggtagcagatttcttttaaacatgcatactctgtaaacattatactctgaactactgaatttctttcttaaaatatttagatttagtgaatttcgtttttgtgacccagtgcattaagaccgaagatttaatacacaaaagatttgaccacacagctttttgttaatcttgttaagtttgtattcacatcaatatattatttatatccaaccaaagcttttaattttcttatatatataaacatctagaacagtaaacaacccttgggaaattgctttttaaagttatttttttccaacataccttttctttacagcacagctgtttagcaatgctctatgtttcagaaacctccctattggatagattgggttgaatctcatgtctgtccctatatacttcaaattgtgaagagaaatataatttgtaagaaatattgaagaattggaagacatatattttaaactaattttaaaagacatgataaagagtttcaaaattcataccagaattaaagttgatgataaagctgtttatttttgcatttgaaaatagtactttatttgtggcaaagttagtcatctaaataattcttcaggaaggaagatgagattttctggaacatatgatgaatataaatttggagatttttagagcacaaaattctcaccctttctcttctcagaacaatatctttgtgttatcatcatctccctaattaggtccaaattaaaggaatgtgaaataggtagaaggtactttcagagagtcctctgtgaaccttacggatttattaaaaagatcatgaaattactaaaatatttcagttcagatagtaattaaatacttatagaaataggatgcatctagactttgaaaaggaactgaaaagaacacttcttttacttcatttaggggcagaggaagcacaccagagctaaaagattccttgattaggtgtcaggagacatgtgttctgactcaggtctctcaccagccatctgggagcttatccttcctctcagtggaggatcctttgtaaggaattcgaccagttttactttaaggttgagctaagttagagaatttactttgtaagccaaggaggccattaaaagtggaattattcccttgcaattttattccaaaatgataatagtcttagcaatatttcaaaggataatttagtatagctaatagcacacttcactttgtttttatttaatttcattaagtgccttaagtctgctttggataagctacatgtagattaataaaataataaacaaatgcataacagcaatggttattatacatttgaaataaattagtgatttatattgtaagtacattaaatatgatactatattaattattttggatttatttgcatcacatgaaatgttttataggccaatctctttttaggttaaaattttaatctttagcaagacagtatttttttcttaaaggatatatctccatagtatcttcttgcaattttcaaaatgcttttctccaactgtgtttacattgagaatccacagtgtttacattgagagtgatatcatttccaatgcatgcccatgttgagatgtgtgtttccaatatgtttgaccactagcagagtgttagatatacatcattttgttggttaaaaaatcattatttcatttcacctagaggctactattaacttgttgaccatattttcatgaagtaagcattgtttgtgcattatcaacaacttccattattactaacatattgtctagcctaattaatagaggctggaagatagagaggagagtgggagagaaagggatggattcctctaagagtgaaaaaacatttattttgcaggtaatggtgttaaactgtagtcaatatattctttatcattaaaagtttaaaagtttaaacagaaggacattctgcagataaatattttaggacggttaggtgaacagaaaccaacctttccccattatataattgaaggtaatgtctcactgcaaagtgatggtagctggatttgttataattatgaaagcctttggttccaacacaggaccaaagtgcatccttcaaatgttaggctttccctggttccagtcctatgaagcacttttttattttcacttcatctttgaattttgttttcatttcctctaaggtaatgtggcagttattgtaacaaacattttttgtctttcgacctgtagacataattttcatctttcagctgctcttcctaatgttggtccagtcctttaaacctgccctacggattctagtctgcccttctttgcccttaattgcttgacctcttatgcttgccttttttttttttatcacttattttgttcatgttaaacactaagttaaaaaattttaaaatgaatgatgccacatttctatataaagaaatgagcattattaatccctgttgttgtaaaacatcattgaaattgtatgctattctctttatataaagtcattctaattatgtcacatgttgaagatgtaaccaaactattataaaggctgcttatccattcacatattgaatagattaagtttgggttttttaagattgttaatttgttattttctctttcctctagtcaaagtgggaaaaagcccaccggtgaggggctccctctctggaaaagtcagcctaccttgtcatttttcaacgatgcctactttgccacccagttacaacaccagtgaatttctccgcatcaaatggtctaagattgaagtggacaaaaatggaaaagatttgaaagagactactgtccttgtggcccaaaatggaaatatcaagattggtcaggactacaaagggagagtgtctgtgcccacacatcccgaggctgtgggcgatgcctccctcactgtggtcaagctgctggcaagtgatgcgggtctttaccgctgtgacgtcatgtacgggattgaagacacacaagacacggtgtcactgactgtggatggtaaggcttttattatctgcaagaaggtagtataacatgacacctggttcagaagcattgagaaatagcactcagaagtaactgttgtttggggtttggatgagcggaaaaacacctgtcaatccagtagtccacgtctttcaccaaaaatgaactggtactcattcaaaagtcaaggcaggtgcatttttggcagccacttcattgattccatgaaggaaagtattgtatactgaaaataacgaatacctcaaggcatgacacataatttaataatcattacttcagtgttgagtcttatcagtgattctttttcaagactctgaaggcgaatctacattttaaaaattattacatatgtgtgtatgcacatgtacatacatatacacacatatatacacatatacacatgaaaaacctttcccccttttttctctcttaatatgattattaaaatatttgagtttgcttttaggaaattctatcttaacttataccgaagaaataaggtatttaataaaaaccatggtacatatcagagtcttaaaaaggccaagacttaataaatatttgaattcgatcaaacagaaatttagtatattttttaagattaatatcctagttgttatccgttaagtattgcagtgagacattttagtttcaccctcttttcaggggtggtttatatgtcatttgaatttaagttaggagacaaagcaaagaaaaattgctttaattgggtacacacataatgccatagcccttggaagcgtaatattttggcaagttattaagcaaaattctaatacccagacatgatggaacagattttcttccaatcctccatttccctataaaatatttacctttcagaaatatatacaaagggttttattaaaagtctttcttgtgtagccaaaaggaaatactttgaatttcagatgcaacacattaactttctgatacccttttatattcaaattccattgcttccttctataaatctatttttatgttgtctaggcatccactaagtatcctgggttcttctaacctttttatcattatttttgttagcctcactactgtgatttctctctctctctctctcttctgtttacgtatcactttttaaaatccccaaaggagtttaacaacttcttaccatttttcatcattaaagaattagcaatggatttgccccttgcccctctgaaacaatgaaaatcctccacttaatctccttagctccatggggtcttcaaattattccagcaactgcagatacttatacagattgaagttccctgccttggtcgaggaggcctctttgtgcccctttactgccaatcttcagtgcacatggaagatttttaattaccaagaagactatttgaagctttgatcaacattaaactaatctaaatctattcaaattcttgcttaagccttagagatcattttaagctatctcttatattcaccagatagcaccatatatattttctggcaattttagagaggttctataaaggtacaaattggcgtttgatttttttttttggcaaaatctcctatttgagtcataaaatatcagaaatgagaaaatgaatgccagttgtcattgcatctacttagtgcccgtgcaggtctttttgcgttggcactgatctgaggcacttatctatgagatgggtagtcttttcccctgtagtcatattactacagtaatataactctggaagacagagatgatctaaggatgaacacatgggagacagtcttataactagaagtcaggctgcagaagataaactgttgtccatcccaggaaattactagggataagaagagtggcacgtatcttggaaaccacagtttatcccaaataacaacaacaacaaagtgttcttaaatgggatgactcttaataaaatctcattcataagacccagttgcctcaatttctatttttcagtgacttctctggcatattagttcaatccactttgatgtcttgcagaaatgagtcatcatatttaccccagctaaaaatggagagactcttgttgacatggcaagagaggatccagagctccacccccttgcttgctctatccttatccctttgaaaatttcttgagccctggagcacagttcaaaaccactagtttataccacccctaaaatacaacaaagtggaatttgaggcaagtatcaggagcttctactaggaagaatttgagaatttatttcaggctttctttggataaaaattatacatgttatctgtcatagcagagaccctacgttatgctggtcaggtaaagaatatgataaacatttgaatggtacatggtggtctactcaacattttaaaatcctttacctaatttgaccttcacaccaatcaagtaacatacatatttttagttccaccttatgggacaggaaattaaagctcagagaaactgacttgtataaaagtaaggagtaaattagggattggaacaagtcttctcactcataaatagtccagtgtcttttccactctagtacattgtctctgaaggtaaatatctcattgttttacatttggaagaagtggtgttagtgaatatttttatgagacaggtgagtgtttcatgcataaatattgggttgaccccggataaagtcctgaagtagaagttgatcttgtggtccccttaggtctttgtatcttctgcagaatctactccctttaggtatctggtgttcccatgattgcgtgaatactgcctgcaatcaggacaactattgggattcagtgacttaaatctcttccttgatctaggagatcccctaggaaattttctggtggagcagaatgggatgtctagatgaatggcatttttggagcccctcaaatcaacatgattttgcataatgctgcatgaagtaaaagtaaataattattatgatattattactatgtatccaactaagttgatacattgctccaatgagaaattttgcacagtgcagtgggagatttgaacaggctggcaattgtttgctgttgtttttgcaggggttgtgtttcactacagggcggcaaccagcaggtacacactgaattttgaggctgctcagaaggcttgtttggacgttggggcagtcatagcaactccagagcagctctttgctgcctatgaagatggatttgagcagtgtgacgcaggctggctggctgatcagactgtcaggtaagaggtctgggggccacaggcttcattattaacttgagagtgagaagaaagtgccactaactagccatttatttccccagatatcccatccgggctcccagagtaggctgttatggagataagatgggaaaggcaggagtcaggacttatggattccgttctccccaggaaacttacgatgtgtattgttatgtggatcatctggatggtaagatgtttgagtttctatatcttcgtatgaactgagaaaactgagggaagaccagaagttcattggaatagagcaagtcttcgtgcttgtttggattccaaacggtggcattttgtttatacgactgtatgattttgtggtaaaataagccgaaattaaagtggaaaggcaaggaggagtgtgtaaatggttatgcaggttagaaatgtcttcagttaatggcaggttttcttacagtcatgctgctcttggactgtttccaatacacttttagatcattgagaatagaaagctgtaagggtggtacctattctggtgagagcataagataaaaatcatgtgatgacaatccactgtgaatccaagtactgataaacaccccagagctaactaaataactccataaactagcccagcaggaattttcaagtttgacttcctgtttattttgttacactaatattcagagcaatccttccttcattcaaccagtcaatacgttaaaccagttaacacattaaaaatcacctactgtgatttttgtaggtactctgctggttgttagagatatgaaatcagttaagatatagcccttcctttcaagtcgcttacagtctgatttcagcactgtcatttctcctttgcctgagttagagattcttaaagacaaatttgagttcaatagtaccgacattatctaaagagcatggtgcagctttattataaaggcacagggaggtgggcacagtggctcacgcctgtagtcccagcactttgggagagctaggtgggaagatagcttcagttcaggagtttgagaccagcctgggtaacgtggtgaaaccatgtctctacataatgccaaaacttagctaggtgttgtggcatatgcctgtagtcacagttacttaggaagtgagagaagtgtgggggtggggggtcctgaggtgggaggattacatgagccagggtgtggaggctgtagcgagctgaggagattgcgccacagcactccagcctaggtgacagagtgagatcttgtctcaacaaatacataaatataagtaaaataaaggcacatggaatagaagtttctacaacttttgaaatggattttcatttgtattaacagctattattagaatcctaaagtatagataatagtgttaaattaaattatacttttaattttgagtaggtgcatataaaaagaatgatctgaattttcttatgtttaaaatgaggaggctggactagataatttctatggtctctttcaacattaaaattctgtgattccctgattctgtgaattgaataagcaatcttagagcccgaaagctagaatataagcagcttatattttcctaatgccttgactaaatttgcatcggaaggcctgctttcaaaaagggtgcttaggtgtggttctctagtatcttagcattcttattttcactatcactgaagattgccagatgtattttctaaaccaaaagtgcagatgtgagcaaattttatttttgtatataggaaaagggaaaacataacatccaagctatggttgaaatacataaaactagagcttttctcttgcctttattttaattgatttaaaaaatagaagaggagatggttggtaggagaatctgattaaataaactaggaaataaattggattattgctattttggtaaggtgggaatttgtatcactattgttttaatttagtgtaatatctacaagggtgatagttataaacaatatctgaaatgctagtaatactagaaatgatccagaggtagcttttgcaaaagtatatgtaagatctaattaacctaaaagatctttaccaaatattatttaaatggtgggctttcgtgattcaaatatgaataagcatcccaagccagattccttggtggaaagacaggcttatgtacccatgaagccaccagccagagagccctagagaccccccgtgtgtttgtttttgagtttactctgatagagctactatcagctcttagctctctaaggctctagactgcccaaattcaaaattattttttcaagcccagggagggattttatagaagtcccagaaatttcagggcctctgcaagtactgtttgaagaatttttgacaagtcttagtggtgggagtccttccagggatttcctagccacactgtcttcattgaacgatggctccccacagtctgctcatagtatcataaccagtgttcaggaactggactctgtcagaagaggagctctgaggatgtatgcatatctcccatgacgagggatttactagtcttatagacgtcctctcccacttccataaacacaatcacttctaaagaagccagtttgtgtcccaatgtaacccaactgtattttataaagttattttggataaatctacatacttggtgactgaaaacttgtaatgtggaatatagcataactttacttaggctctttataccaaatcaacagaattttcatctttttgttttaatatgtaaaaattggaagagaaatataaaagagtcagttcaaatattaattcaagcactggctgaaatcagtgtcagcaaagtaacaaggcatttatttgtttcatagaagaaacttgacaattctggaggatattcagcatgtttacaataacactgttcctgacatttttttcctccttgtttattggctcttggactaagtatcaaatctttggacactgttcttttctttcttggcttgaaagtgagcaggaatgggggtgaaaggtaacttttatggctgatgaggtaagaggaagatcacaaaatcattcttgtaaggcttctctcatttcttaactgaagtatatgtcttcccttttgaagtacagaccatggctaatgagtgaattaataaaaaattcttgtggaaagttgactacataaaattacgtctggtatttcaattgtcacgttgataaaagattatttgaaggtgagtcaagattccttgtaagaggcattgctaaattcatgagtcaaataattcccacctatattttattatatttgggggagtcaagtgtgtgtgtatgagaaatggtggggacagtaaaagatttggtatattcagaatgcatgtgatggaacacacacataggagttatgaaccaaggtgcaattaatttagatcagaagccatatattccagatggtctgatgaaaaagccaattaagtataaaatgaaaacttgctcaaaaaggcaattaattttccgttttaatttaattatttattgtgaaagatatatagttgacagtatgttgacctgtttttttctcctttcttgttttataatgtcatatcttcctgacatatgtgtttctctataaaatttgaataattgcactaaattaaatcctgctagttttgggagaaaaatctagtagggttctttttctaaggtggtgattataacagttatgcatattcaatgaatattcaattctgcttttcaaaataacctattaagttttaaagagtaattacattagctatattcactagtaaacatttcaatatcagctcgtgttcttagaaatggtctggaaattatgatggcttattagagatgattcaatcagtaatagaatgctattattaagaaattaatggaattaaaattttaaaatgggaatctagaaattaagatccacaaaataatccttattaggaattttaatctttgtttcccagtaagacagatttggaaaacattgggagggttttaaggtagagttgagatgattaaatggctcaagaaattaggtaaaggatcggaattatttaagaacgaaattaatagactgactatttatttggtttcctgatggtagcagatactttaaaaaataagtttcttttttaggcatttaatttatcctgcagataaattggaggattgcagatgaggtcctattaccttctttcattgttgacccacttagtttccttgcaaatgagtcaatacttccagtcttgtccccagacctgacaaatggttggttcaggagcttctctcccctgtgacataggcctatcctcttatggcctgcattttctatgtagccctgccttttggtatttacttcacctgggttaactactaccctactattccaattctctgtttttttacacaagcttccagcactttgacaggcctatactgtgggcactctctttcatctcatattccctcctgaagacctaggtgattcttctcatctttaccatctctgaaccttgaatgtatgactataattaccctcttgcaaatatttgcttatacttctttctctcctactaaactatggattgggggaaagaaggaaacatacaaattcatttttgtatgcccaatatgtccttagcatatagtaggtgctccataggtagagctgaataaatgagtgaattaatgaattaacttctaaaccattaatgcctccctactcaccttgatttacaattgctttctggatagtttcacacttctccaggatccatcagtatactatctgcttcctgatttttttattgctttaattttcttattagtttgtttaatttcatttttgttctcttgtacataacttgtaagccaaaagtcttgtgggacatatggggcatgaaagaataccaaaagaacaaatacgtgaacaatgaagatgttaatttctagttttgcatgtttagctcctgaattcttttctgaatttcatacccatatttctagtttgtgaatcacttttgagtttcatttttggttttggttgtcacaaatagtccccatcactttaagagtccttcaggggatctgttttactaccatcaaaacagttaaacaccattgccatgtaattctcctacttaacgttgtgtgttggttttgttggcttcttccacaagcacatactctgcctggtcttcaaaacctatacctgctctactgcaatctattcacccttcattcccacactcttcaatgtgaccccacacacgtgcatctcgccctgcacagaccctttgcttgctcctgcttgcaagtctgctctgttcctctcagggaacacacacccttcatctcttcaacattgtgattttgcctgtgcttgaagacttactgcttccaggatcccccttttggctattgcagctcacactgaaatttcttgactctgaacttctactttacttagagttagttccatgtgatttattgcttaattgttttctggtttctttgtgttcataaaatataaaatgttatatgtttgttttatttcagcaaaattattgtaagctcctagtagagataagaccataaacttctatatgtttcccaactgcaatcaagagcctgttccaattgcagacacgtaatagttatccaataaatagttggtggtaattatagtatttttccaacctttgtctcttctggaaactgccttccaccaccacctttccatttatctataacacttgaaaaaatgctttgctttatttaccaaattcaaaaagatctactttttaccattatttaatcaccatgatactattttttcctctttgtatttctcctctcactcttttctcctctcactcttttctttgatgtctcttagaaattactccttcccagagatactcctttctggcctctcatggtaaattattttccttgccttccactccttcccagcaaattgtcctctctgggattgcttttcttgtattaatacctattcatcaattataggttattatttttactgtttcttggtgtcagagtccaggatggctttgtcacctctgtgacttatctaatgcctccatatcattcttgtgcctcacctagaaccaaaaacaacttttccatttttgttactttatgagctcctttagatatgaaaatctaaacatttagataaacatcatcaagtaggtcttagagcagggttagttctagctttttaaaggttttggttggaccaaaatcagatatcgcatctggagattgtgtaatttctttcctatagattctcagattgcctattaattttaatgagatttacagtatgtaatctacagaatacttcactgatgaaggttatttaagaattagtgatttgcgtccttactgggcttattcagttaaaaagccacatatcagcttgaagagcctcttgcacactatgattccgccgatggttaaagtagtgattcttgatttcagaatctcttcacatttgttgcagttggccctagaagatgctaaaaactttttaattatccgtagcttcctatatagactttggagattaacacaccttgcttggagttgcttctgtgtacagtgtttgaacagtctacctaagagccaatgaggaaagcaatcaggcacagcatggtgggagcacctctggaagatgatgtccttatacagtgtagtgactccagtaagattgagtgtgaggtagtttcatgagtagaatgaggaaggaaaacatctactgtgtggtgggagtattatttaacttaaatcttatgaaacctttgtcaggcactttttaaaagaaacctcacttttgcctataagaaaactgaggcacagacaggttaagtgattagatatgccttttttcttcttctactgccataaactcacagggccactaaagattccccagtagagcagcaggcagtcttgcaagccaagaagataaaaagtaccctcaaagctccctcaaatctctgatatctcattagaaaaaatcataattcttatttgagcaatgattgcattacagattggattacaatgattgggattgctgggtcaaatggtaactactttgaactttttgaggaaatgctaggctgtttttcaatgtggctgtaccattttacattctcatcagcagtgtattagggtcctgattcctccacagtcttgtcaacacttgctattatctgaccttttgtgtagccatcttaatgagtgtaaagtagtatctctgtggttttgaattgcatttctctgatggctaatgagctccaacatctttttatgtgcttgctagttatttatcaatcttcttggtagaactgtctactctgaaactttgcccacttataattgtgttgtctttactattaaattttgagtgctctttgtatattctagatttgcatgtcttctcatgtaaatgatttacaaatagtttctcccattcagtgagttgtctttttactttcttgataaggccctttgaagcacaaaagtgtttaatttagatgaaaagtccaatttgtctatttttaaaatttttgtgcttttggtgtcatatctaagaaaacattgccaaatccccagtcatgaagatttatctctgtgttttagtctaagagatttataagttttaactcttttgcttttattttgatccatttggagttagcttttgtatatggtgtgaggttggagtccaaattcattcttttggatgtggtcccagcaccatttgttgaaaagataattatttctccatttaatgaccttggcaccctgttgaaaatcaattgaccataggtagatgcatttatttctagactctcaattatattccattgatctgtatgtctatctttatgccagtaccacaatgtctttattacaattgctttgtagtaaattttgaaaatggaaagtgtgaggcttccaactgtgttcttctttttcaaaattgttttagtattctgggtttcttgagttcccacatgaattttaaaattggcttgtcaatttctgcaaagaagccagctaggattctgatatagattgcaatgaatctctagatcaacttggggtatattgccctcttagaaatattatgtcttctgatctgtgaacctgagatgtctttctgctattttttagatattctttcattttattcaacaatattttgttcttttcagagtataagttttgcagttcttttgttaaatttacttgtaaatattttactatttttgatgcaaatgcaaatgtaattttcttaatttttttgattgtttattacaagtgtacagaaatgcaattgatttttatatataggtcttgtatcttgcaaccttgctgaacttgcctcttcgttctaattgttttttagtggattccttaggattttctttatacactctctttcattttataatcttactttacataagtagaactgtcttgacataaactccttgaagcatgtgacagtcatttgctttaaggttttcatgtcagggtctcctggagttctgaatcaaaagagcttctttggaaatacagtcaccatttacctcccagctgtgaaaagccaaaaaaacccaaactaggctgatactcctgtgttgacctgaggtcattctgtgcctgtcaaaccaaataacacattcaatcttttgtatattttgaagactcagaaacccagaaatttttagaacctctttctcactctaattaaaacctactgctctgtcaatgggaaagaatgagtccaaacattctgaaaaccgtacaaatgtgtttacattttagtgggggcttcctgcatctttaacctctttaaattgacataggtaagatcttgtgtaataacacatttgcaaatatgcagatgcattttcaaatgaatataatctgatttagagaatattaactgactatcatagtagactatggataatactctaataattaattacaggttaacatttttaaaactcaaagcatatgctttaagtttatgctttaagccacgttatgttctacttcagcctaatacaagggagaaatttggagggggccctcctagctttctagtctcattattcccaaattagaaacattaccagcctaacactaactctggggtctaaaatgaagttattttggcagccctagagttttcttgtcattgataactgaagattggcctttgtgcaggttaaataatcaaatcttagaggaaattgacatgcttttaaattatctacaaatattagcccttaaaagattatatagcagtatatattatgttaaccaatccatgtgcagctgatggactttgtgattcagtggataataagcattagtttttcctgctttgatcttatgtatatccatacagaaaaacaaaaaaacgatggagagagagatagagagagagagagaaaagaaaaagaaagtgttgaaaaagcttaaaagtccaacatttcaaagctaatcattttgttgaattgttgctatcaccttgatacttgatatattctgttagtgattttatcgtatgggtatttagaagctcatttcatgtaactacttccagcttactcatcccatttacttttgcatacatttattacttatacaccattttgacccagatagcaaggtaatgtgaaaacatttacaaatgttgaacttttgtagtaaaataacaacaacaacaagaacaaaaaaccaaaagagcagggagtgctgctcccaaatggacaaaggaaattatgaattagtttataagaactgattttcagaccaaacagtgcagtatagtagagctataagcactaatgaacagaagaaacataatcatgtatcacatcacccagcaaatatactctgctacaaaactggtaagatctcagctttgactgccacagagagcagcccatctgctgcagtcaggaaagaattgtgtaattatctgtgattaagtcctcctttcaccttggtgattgcaagaattgtcagtgggggagaaatatcctatcctagttttactctagactcaggctctttaatcatattgttgagtgactcctgagtataaactctagcttttgaacactttgggtcatttttaatgttttgatttgttttcatcattgcttgccatttcagtatgtgtcatgtttgagtctgccaagaagcagcttttccacttagcaaacagaattgtgaaaaaaatatacatggtccactttctagggagtcttgtagcagctagtgatcaaattagagtattttttcccttaatttctgatgttaattcccacaataaatttagtttgtggaatgtcattaaagtcttacaacatgtctcccgtttcttctagagcatccctggaaagttgaagtaacaggaatatgtcaaagctataagtatttaatttgaaattttggaaaactatggcttaagatactgcatatgttttccatatgaatatgcaaattatcctattcatgaaaggctctgttgtatatcatattttacatgtacactaatctgaatgtatatgtatataccttgatgaattttttttttttttttttgagacggagtctctctgttgcccaggctggagttcagtggcatgatctcagctcactgcaacctctgcctcctgggttcaagcgatcctcctgcctcagatccccagtagctgggattacaggcatgcaccaccatgcctggctaatttttgtatttttagtaaacatggggtttcaccatgttggccagtctggtctcaaactcctgacctcagatgatccacctgccttgtcctcccaaagttctaggattacaggcatgagccactgcgcccagcctgatgaattcttattataacaatttaacttactgtaaacctgacatcttaagtaatgcatcactttgtttatataaaatatatttggtatatttcctgatgtattagtccattttcatgctgctgataaagacatacccaagactgggaagaaaaagaggtttaattggacttacagttccacgtggctggggaggcctcagaatcgtggcgggaggtgaaggggactacttagatggtggcagcaagaaaaaatgaggaagaagcaaaagcagaaacccctgataaacccattagatctcatgagacttattaactattatgagaatagcatggggaagaccaacccccatgattccattacctccccctgggtccctcccacaacacatgggaattctgcgagatacagttcaagttgagatttgggtggggacacagccaaaccatattgttctgcccctggcccctccaaatctcatgtcctcacatttcaaaaccaatcatgccttcccaacagttccccaaagtcttaactcatttcagcattaacccaaaagtccacagtccaaagtctcatttgagacaaggcaagtcccttccgcctaggagcctgtaaaaatcaaaagcaaactagttacttcctagatacaatggggatacaggtattgggtaaatacacccattccaaatgggagaatttggccaaaaacaaaggggttacagggcccatgcaagtccaaaatccagtggagcagccacattttaaagctccaaaatgatctcctttgactgcaggtctcacacccaggtcacgctgatgcaagaggtaggttcttatggtctcgggcagctcagcccctgtggctttgcagggtacagcctccctcctgcctgctttcatgggctagtattgagtgtctgcagctttcccgggcacacagtgcaagctgtcagtggatctaccattctgggttctggaagatggtggccctcttttcacagctccagtagggagtgcccctgtagggactctgtctgggggctccaaccccacatttcccttctgcactgccctagcagaggttctccatgagggccccacccctacagcaaacttctgcctgggcagctaggcatttccatacatcttatgaaatctaggcagaggttccccaacctcagttcttgacttctgtgcacccacaggctcaacaccacatggaagctgccaaggtttggggcttccaccctctgaagccacagcccaagctgtacactggccccactcagccacggtttgagtggctggggcacagggtaccaattccccaagctgcatacagcacggggaccctgggcctggcccatgaaaccactttttcctcctgggcctccaggcctatgatgggagtggctgctgtgaaggtctctgacatggcctgaagacattttatccacggtcttggggattaacgttaggctccttgctacttatgcaaatttctgcagccggcttgaattcccccgcagaaaatgggttttccttttctactgcatagtcaggctgcaatttttcaaaacttttttgctctgcttcccttataaaactgaatgcctttaacagaacccaagtcacctcttgaatgctttggtgcttagaaatttcttccaccacatactgtaaatcatctttctcaagttcaaagttccacaaatctctagggcaggggcaaaatgccaccagtctctttgctaaaacataacaagagtcacctttcttccagtccccaagtccttcatctccatctgagaccaacccagcctggaccttattgtcaatatcatcagcattttgggcaaagccattcaacaagcctctaggaagttccaaactttcccacattttcctctcttcttctgagccctccaaactcttctaacccctgcctgttacccagttccaacattgcttccacattttcgggtatcttttcagcaacaccccactgtactggtaccaatttactgtattagtttattttcacactgctgataaaggcatacccgagactgagaagaaaaagaggtttaattggacttatatttccacatggttggggaggcctcagaatcttggcgagaggtgaaaggcacttcttacatggcagcggcaagagaaaatgaggaagaagcaaaagcagaaagcccctgataaacccatgagatcttttgagacttattaactatcatgagaatagcacggggaagactggcccccattattcaagtaccttcccgtgggtcccttccacaacacatgggaattttgggagatacaattcaagctgagatttgggtggggacacagccaaatcatatcacttgacattttatttactgttttcaattagagaaaaataaaacattttctcatggataggtaacatttagaaacatgttccaaatctgtgctctaattacaactttgataattgtcctatcaatttagctgctttgatgaggctactcctggaacttattaacaggcttcttgtcaaactacaaaaaagatgcttgttttccaggaaagcaactatccgttaaatctaagaatacattaaattgttcaggtacaagtatccaggagcagagatagaacacaactttgttctatgctactaaaatagtcattttctctcactgaaggctgtgcattccctgtctaactctaaaggttgtactgtgattaaaaactcagaaagaacttttattattcacatcagagataaaaaggtggctttatgataccctctgggtaggagcttacacagttgggccaattaaatcatgttgagagagagcaactaagcaaacgtgcctatttgatttgcttgatttcccatgtttgctgtgatcagtggctttctcttttgtctgttccttggattcctgatttggctttgcctctaggcattagatgttatctttggaggcatccttctatgagcattcatttttggaccaagcctggatttacaattctattactggcccagacttcatttctatccaatttcattccactgtgctatagtttacaacatataatttgacttataaataattcctgactatgggtttaaagactgaaaatggatcaatagaaactttgaaaatgttaacatcttgattgcttttctcagtgtagaaatggacaatgtttagcttaaaaactgcatgtttttaatgagatacggggttgaaagacttattcctggaatttattgttctggagaaagcctgttgctatctgccataccttggtttactttgtgcaaaatgagcttctttttaagtaatgagctctttccatgttcagcttaaattgctgtcttagacacttcatcagggttccctgctctgcctcattcccctttttgctcacttgcagcctttgacataatcctgggaggcaattggcatcatacatattttgctttgtaatctcctgctttgattctgactgggtacccagtctgctcactttgcttctatcttaaacaggttgacacataccagaaacttagtactaagttatgtgtgttgtaagttaattgagagtcctcttcttgattaaaatataggtctttagaacagtgttttccaaaatattccacaaaacaaatttatgtacagatgtccctgccttaataatagagggttgatacatggaaaggacagaagtttggacatttaacttatcacgtttggtatagattgggtgttagttataagagattaaagacatactcaattctatagtgtaaatgcttcactatatcattaggtttttgaggtgagcaaggaaatgttcacactaaacaattatgatttaggaaggcttaaatagttattttttagaacagaatttaagtcacttttttccttttctcattattctgaaataaagtaattattgctgaataaaataactgactgcacgttatcttaacagattaattcttttaatcctcaccttaaagtaaactcaattgattctggttaaatcttcctttttttcatctgaattacaagaaacccaatggtaatgtttcttgcaatatgttttataaaaattttatttggaaagtttgaaaaatttctacacataattgaaaaggataagttgggcacagtggtgcctgcgtgtagtcccagctactcaggaagctgaggcaaggaggattgctggaggcaaggaagttgaggacagagtgtgctatgatcatgcctgtgaatagccactgcactcctgcctggacaatttagcaagactctatcttttttgaaaagaaagaaagaaagaaagagaaagaaagaaaagaaagaaagaaagaaagagaaagaaagaaggaaggaaggaaggaaagaaagaaagaaagaaatggcattagggataacagaatttaatcaaagtagtaaaatgatcattctatgggtatcaaacaaataaatgaatatcgtatacttcaaacaagtgagttaaataattgatagtctgatataaagtcagatttaacaagagtttctacatgaaaagttctataagtaggtctgaactgattaactactactaagagaattctctttgtaacaggccagcacctactgaagcctttctttcttttaatactgcaaacatgtttgctgtttaaaatagggaaaccagctacccatgaaatcatgctgccattttttcctcattagccctttggtctggtcttccttggagaagttgatgttcctcaatagatagactaacagtgcagttggagaagcagagttttactcaattaattatatttctttgcccttccgtggttggctgataacacttgttacttaagaggaatggtagtttcgccttaaggtaggagtatctcaggaaatgcaggaaactaaggcaacacaactaatattccagctgtaataacaagtccaagggttctacctctcagggaaaactgttggcacgctgccttctttacacttgcagccctttcaggcctcaggcaagtgttattctgaggtgaaggaggctgttcaggatgacgtaatttctctgtctgcctttctccatgttgctttgagccaagtctattgtgagataaaatgcctgtttcaggcagcagccatctctccaaagctttgtagcagagttagctttatttaatgtgctgttgggaaggatagggggaaaaaagagacctagcttcttaataagaacttgaagtgccattcatttaacaaatcttattgaatacatactatgtaactggccctgtgacccttatgcttttaaaatttattaggaagggagacgttgtgagagccgggaggggaactttttcttagagtgtattgttgtatttgagattactgtcttttgccagactagataattaagaataaaaagctatgtacacctctaccacttctttcagtcaggtgaaagtaatttctctctcccttcttcaaatagctctcattgaaatttggcctactttcctcaatagcaattttagatatatagtgagaaaagccgatatgtgtgctttggccattttccccatgactaatttttcttgttttatagtgctatcacccactcagagaaagtaatagcactattcattttaaacaattgcttgatacatctggatttagtcaggtgaagatccaaatcatgacagctctttggatcccagttgtctaatatatcatagaatcagagatcagcttcagtgagatggaaacagtactctcagctacaatagtgggctatcaacattttaactttctgtttcagttttcatttctcctcctgactgtgatattggcttaggtattctataattctgcttctgtctttggttacttttgctcacatgtgaaaaacataatttaatttgtgtggaatttatttcagcaaactgttatgttagttagctaagtaaaattccaacttaacaaactctgaagtttccagaatctttcattgtaacatgttaaatgataatgaatataccctctgctaattagacttggtaataaacaaagcaactgtccagccttttcttgttaatcaatcagcaaattaaaaaacctctttaaccaatctcaccactttgggaggccgaggcgggtggatcacgaggtcaggagtttgaggccagcctggccaacatggcaaaaccccgtctccactaaaaatacaaaaattagctgggcgtggtggcaggtgcctgtaatcccagctacttgggaggctgaggcaggagaatcgcttgaacccgggaggtgtaggttgcagtgagcccagatcgtgccactgcactgcagcctgggctactgagcctccatctggggcccgagtgagtggggtgttgggggagtctttctctcttttttttttcgagacggagtctcgctgtgtcgcccaggctggagtgtggtggtgcaatctcagctcactgcaacctctgcctcccgggttcaagcgattctcctaaaaaaaaaagaagtctcttgaacctagttaaagcccctactagcacttggggtgtctttgtaagaattagcaaaaagtgctccctctgcacagagcaagtaaaacaaaggctttatccaaagaggctggagttcctttggctggctgagtgggaggcgacctaggccttccctacacactgggcctggtgctcctgtgcaggccgcgaccttcgtaaccatcatggcagccctgtgcctgatacgggaaggcaggaagtagaattctgtaccacttctgagcccttcccatcttcacatttctggaggttttcttatttttttttttttttatttaatggcgttaatccactttgtcggtagttataaatgagaaggaaggccagagaattactatttgattttaggataaacaaagtggaataaccgtggtggcagttcaatgcaaggtttcccttccaatatgcaatgttaggaagcacatagcagactttttccttaaaaaaacaaaaacctggatagtaatctaaagaatcactcagaaggatttgttcattttaaagaatgtattataaaatgttattaaatgactgattctatggccaatgtacacacacacatacacgtatagaataaaacttctcgggtatgtgttatttatgattatgtattcataattataacgaagctaagtcaccattatcttttctgctttaaagtatcagaagctgctaccttgccatgaaaaagtattacatgctcctccaattccttccccaccatatttatccaacaggaaaggaatgaataataaaactttgggctttttttcccttcttttttttccaggtgatgtgttccacctcactgtccccagtaaattcaccttcgaggaggctgcaaaagagtgtgaaaaccaggatgccaggctggcaacagtgggggaactccaggcggcatggaggaacggctttgaccagtgcgattacgggtggctgtcggatgccagcgtgcgccaccctgtgactgtggccagggcccagtgtggaggtggtctacttggggtgagaaccctgtatcgttttgagaaccagacaggcttccctccccctgatagcagatttgatgcctactgctttaaacgtaagtgtttgatacctttttaaaaattacagttttaaaaaaaatgcttcgaagcatgcattgatgttcaactagccgttggagtggattccatgtcttgcagtgtgtgcacggaatggaaacagttcagtgattttcaaaagcaagcaaactgaacagcagtgatatggttaaaaccacaggaattttggcaaatggatttttagaggggtgaggaaatatcaggttaagctgtaactgtgctctgttgtgtccagagccacagagcatttttctaagtattttatattaattgcagtccttaagttttgcaatttgtttattggtgttacaatgccaaggccaactgaggctgagttaaatccttaagattgttgattttgtcttcggtatcactctgtttctttgagatggcaaagaatttaaatttcagtaattacaggtgagtatttgaagctgacatggatactcaaaatgttcaagtcataactaaaaatgaaccatactatcaataaaaatctccatttatgtcaagtaatggaaatacatgccttctaatcattaattctgtagtatcatattgacgtacaatatgtgttctttgcaacctataacagagtatctttagttaggtttactaattaacatttttttttaaataacatttctcaacattcatgatataattattttaattttccagatgtcctcaagtaattttagcagtagtagtcacatgatatagtatcatagttgtagaatgcaaattaaacaagcaagtaatctagcatctcattggaatatttactgaaccatctatactatgctagctaaacaaagatctcccagaattttggtgaccttgggtaatatccaagacagagttaggttatgttgaaacaaatttgtaaacaactttgactaaatttccaatgtatcttgttatagcaatatgtctctaaaacgagtacaaaatgtactagcttattatataattgatttctagagtgaaatacacaggcatttttaagcaaccaaaaatacacagactgtgatgttctaggtagtcagtagaatggatgttaatgcaaccaaaaggtttgttttcacacttttatctcctagctaagaagcctctgctctgatctcctcccttagactcaactttctgagtgttaaagccatgtgttctgtattagcttgccacaagctggtcgctccataaagactgtagaaaatgctggcttttgttctcaggccctgaaacaacagaattcttccttaatcattttcaggaaaacaacaatagcataaaccttatctctaaaagtagacagatgtacattcctttaagctacattgtcacaacaatgatttttcaagtacttcaggctctaaaatcagttttacattacgtgactgatataattaaggagcaaaatcagattggtatgctgtggggaaggcattggagaggttaaattagggaacgaatagaattatccagcctgacttccttatttgatattttcttgtgctttattaataaaactggcactggaaaacttttaaacaacatttttcgtctctctgtgggtaaaatttaaatcaaagcctgtctgtagccacaaagactattattaaagaattcatcctgatgtgttttaaattatttatttaattgaaaaatacacatgaaataacaaggtacttatgtttaaatagagtaaccaaaatctgcacaaaattcaaaaaatgtttaaaagtttatattcatttttatctctctaattcatttacatgtatgtaacttgtaaatataatggactcattattttgctttccttcccacctaagcatgtggctagattcttatttatttcctacttaagacgttattatattcagaattcatttagtgcgtagaaggttaaaagcatttagccatatagaagcctttcttaaaccacacataatgccaatagttttccaaaatttctaatttatttttcaaaaaattttttagtgtatatgtgtgtgtgtgtgtgtgtgtgtatttttttttttttttgaggtggagtttcgctcttgttgcccaggctggagtgcaatggtgccatctcagctcactgcaagcttcaccttccaggttcaagtgattctcctgccttctcctgcctcagccacccaagtagctgggttataggcatgcgccaccgtgcccggctaattttgtgtttttagtagagatggggtttcatcatgttggtcaggttggtctcgaactcctgacctcaggtgatccacccattttggcttcccaaagtgctgggattacaggagtgagccactgctcctggcctagtatatatttttaaagaatttgaaaaatattttcaaaatgacttaattgatgtccacctttcccacatagtcaagtagtgactaaattctgtagggtaaaattcataagagtcatggcctcagctacagttccaaagtgatttcagagatatacagctggctggttatgtagaggaatttagaaatataaccatatttttcttgtttgcttctaccaaacgtagaaagtgttttttaagtcacttggtgaataaacaatgccaaatcgtaccttgctttaattccctttgcctcacaaagtcactgactaaaacattcacaaagacagataaaagacataaaattaggctttattcttttcaaataaatttgaaaagtaagcaaagtaatgtctttgtaagataaagttttcctgtatatcttctcttaatgattaaacaattttgcatatttagttttttacttcagaatttagcaagttctgtgaaagttggagagttatacaaggctttgaaagatcatttcatacatccccaaacttaagtgaatcaaaaccattcaaaactcatgataatctctcacagaatgtgattaattatctccaggagagggagatggaacatgtttcctagaaaactcattctaatattccatgaccttcactctcagataatttttctaattaagtactttgcatttgaatttgaacccatgttttcatttttgagttggagaccaaaatctgaataacagccatttctattgttgatcacaattgtttatttatccctcagcatcttctccaactgaaacagttttcttgttttacagtttcaatctccaaatttctaattattgatatgttcttgctttgaagtttcatcattgtttagcacattcctctatttatgcttaagtttagaaatcaagatggtggtccagagaaggctaaattaattcccaccactttctatcctatcttatatactcattcactgttaaaatttgcctgcccttctaacctttggttagttcattatcttttttgtgtgtgccctagttcataatctgaccacatgtgccaaaactaacctttccccgattggtatattacaaatgtttcctgtttattgaatttgaatttgttagcattccatcactcatataactttaaaaagatagtttgaattggccgggcgcggtcgctcacgcctgtaatcccagcattttgggaggccaaggtgggcggatcatgaggtcaggagatcgagaccatcctggctaacacggtgaaaccccatctctactaaaaatacaaaaaattagccgggcatggtggcgggcgcctgtagtcccagtccctaacccaaaccctaaccctaaccctaaccctatccctagcctgtagtcccagtcgggaggctgaggcaggagaatggcgtgaacctgggaggtggagcttgcagtgagacaagattgtgccactgcactccagcctggactacagagcaagactctgtctcaaaaaaaaaaattatatatatagagtttgaattgtaatttcactgctccaatctttacagttttataaccatgtttacatttagttatgtataacaaatttaatatagaagaaccaagttaaaattagtcatttctcaataatgtagagagcatgggaataagttaaattgactatcatgctgctaatgggggttttaagttttattaggaaaatctgtctcatgtctcgcaacagaagcagagaagatggcccataggacaaaaatgccataagtacagtgatgtgaaacatctgtgggcagacagctgcaaaggttggaaaggaacttttgtgggaaaagaatcgtgttgatttatgttggcttcctcaataataaagttgaaggaatactggtagttttccagagccaaaacttctccatgtgaatgcacctattggaaggacactgttagaataatctggaattgtttttacctttacaatagtcatcagaatacagtggtatttattcttaaaatatctcttcgtagatattgtgctttataaaattatttccttttgtggaatggttgaaacaaatggcacaaatcctcagatacactgacttgtgatcaaaatcagctgttaagttgatgaaaaagccacccaaactgaaaaggaagtctgaggttttccattccaagtagtagaattaattaacttaattataagcagaccttttcttttttaaaatagggctctaaaattattgaaaacccttgtttttggaaacaaagtcacataaatactggctttctagaacagattctctaggacatattgctaccactttattacacagcaggactagaggaaggaatgcaacagcaaactccatagtaataattgacaatgaaatctagttatttagttttaaaaatatgagtcaacttttaaaacactataaacatattttcatagcattgtagaaagttgctagcagagagcttggattggaacataggaagcctggattcacagcccctttggccctaatgcaattgtacctgtttctaagttaatttcatcagccaaggaaatactcagagggaaaaagtaaatttagcttttttgttgttattaataataatatgattaaattttctctaatatgctgtttgctaagtatttatattatgtttccatgggaactttttctgtatgtatctttttactatttccccaaagaatgcagttataagacaaacatgaaatttggcagttaaatgaagtaatggttatggaatttcagaggatagagaattgaattaaaatagtcatccacattttgggtttttaagttgttcatgtcaatcaaaatagaacaacgcttcttccaggaaatgaatgtagaaaaagcttttctttaaaaaggggaggaaaaggttatttaatgtttttaaactccaactcttttttggttagttttgttttaatattagaaagataaataatgacagactttaaagaatatttaaatgtatcataatgtaaatagccctcaaatgttcatgataaaatcagtgaagctgagctttaaaatggtctggggaatgaccacaactaataacagctcgtgccagacaaaaaataaggaacctgttacagccctagtctgatttacaataaaatcacatcattttatgattaagtttttacagagcaaatggagctaaaaggtagcctgttttgttttttgagggctcctgttctggaattattaaaaataaaaaagaagatactatagatactatggctattacacctcttttcagggcaaacaagcatttactcataaaactagctttaagtcctataggatgtagcaaaacaataactacaggtttcttcaggacagttcttttgagttcagtggcaactattaataggtttttatttttaaaaatactgatttttattttaaaaaaacaatcattatatagtaggctgctgccttttccctgtgttgagaaagaatcttgtttacaaactgttgcttttatacacaatttaaatttctttcaacaggccaggccattctctgtaaatctggagccattataatgcagcattttatgatgacaggttactttatattgcctgagcctgttctttctgatgcttagggttgttcccagtgatttgtaattacagacctaaaatacattatgtgggtactttacttcctgttctacatttgtgtttcaggctaaagtaagcctggaaacaagatccttaggagatacaaacagagtgtgtagaacatagaacaaaatgtagaactacaacaaatgccgactagcctctgccaggcacattttataatttattagaaacaaatctacaccatgaagttgaaagaaggatgaagacaaatgtccaacacctgggatcaagtgaagagtggtattaaaaagttttaatatcctgtttttatgaaagtctccacattatggacaatgtaatggtttatatgtaacttggatacatttcatgtggcttttttgttgttttgcaatctgagacacaccctctcccctgagataatatgcagcaacttgaaaagaagggagcatgtggagaaagctggagacagggtacagaagcctccagaagaatagtactaaattctcctgcgaggcttcaagttgacgctgtagtttctggtaaataaacaatctactgtatctaaaatctgcatttatatttttgggagcttttccttatcttaaaactacataatattaattttcctcaactggtaacagtcatgcatacttttaggtaaaagcagtgataacccttataacgtaaaacaactgatcaatttatgactattaagtgttcaattatctgtccttgggttaattcaagtatagttttaagactcctctccatcacagaacatttctgggccacccaaaaatactccctacaaaatactcaggagcacttaacaaacactgggcatacaagtttttattagtgacttgtctaatcaactctttgaaattatttttctagctaaagaggctacaaccatcgatttgagtatcctcgcagaaactgcatcacccagtttatccaaagaaccacaaatggtttctgatagaactacaccaatcatccctttagttgatgaattacctgtcattccaacagagttccctcccgtgggaaatattgtcagttttgaacagaaagccacagtccaacctcaggctatcacagatagtttagccaccaaattacccacacctactggcagtaccaagaagccctgggatatggatgactactcaccttctgcttcaggacctcttggaaagctagacatatcagaaattaaggaagaagtgctccagagtacaactggcgtctctcattatgctacggattcatgggatggtgtcgtggaagataaacaaacacaagaatcggttacacagattgaacaaatagaagtgggtcctttggtaacatctatggaaatcttaaagcacattccttccaaggaattccctgtaactgaaacaccattggtaactgcaagaatgatcctggaatccaaaactgaaaagaaaatggtaagcactgtttctgaattggtaaccacaggtcactatggattcaccttgggagaagaggatgatgaagacagaacacttacagttggatctgatgagagcaccttgatctttgaccaaattcctgaagtcattacggtgtcaaagacttcagaagacaccatccacactcatttagaagacttggagtcagtctcagcatccacaactgtttcccctttaattatgcctgataataatggatcatccatggatgactgggaagagagacaaactagtggtaggataacggaagagtttcttggcaaatatctgtctactacaccttttccatcacagcatcgtacagaaatagaattgtttccttattctggtgataaaatattagtagagggaatttccacagttatttatccttctctacaaacagaaatgacacatagaagagaaagaacagaaacactaataccagagatgagaacagatacttatacagatgaaatacaagaagagatcactaaaagtccatttatgggaaaaacagaagaagaagtcttctctgggatgaaactctctacatctctctcagagccaattcatgttacagagtcttctgtggaaatgaccaagtcttttgatttcccaacattgataacaaagttaagtgcagagccaacagaagtaagagatatggaggaagactttacagcaactccaggtactacaaaatatgatgaaaatattacaacagtgcttttggcccatggtactttaagtgttgaagcagccactgtatcaaaatggtcatgggatgaagataatacaacatccaagcctttagagtctacagaaccttcagcctcttcaaaattgccccctgccttactcacaactgtggggatgaatggaaaggataaagacatcccaagtttcactgaagatggagcagatgaatttactcttattccagatagtactcaaaagcagttagaggaggttactgatgaagacatagcagcccatggaaaattcacaattagatttcagccaactacatcaactggtattgcagaaaagtcaactttgagagattctacaactgaagaaaaagttccacctatcacaagcactgaaggccaagtttatgcaaccatggaaggaagtgctttgggtgaagtagaagatgtggacctctctaagccagtatctactgttccccaatttgcacacacttcagaggtggaaggattagcatttgttagttatagtagcacccaagagcctactacttatgtagactcttcccataccattcctctttctgtaattcccaagacagactggggagtgttagtaccttctgttccatcagaagatgaagttctaggtgaaccctctcaagacatacttgtcattgatcagactcgccttgaagcgactatttctccagaaactatgagaacaacaaaaatcacagagggaacaactcaggaagaattcccttggaaagaacagactgcagagaaaccagttcctgctctcagttctacagcttggactcccaaggaggcagtaacaccactggatgaacaagagggcgatggatcagcatatacagtctctgaagatgaattgttgacaggttctgagagggtcccagttttagaaacaactccagttggaaaaattgatcacagtgtgtcttatccaccaggtgctgtaactgagcacaaagtgaaaacagatgaagtggtaacactaacaccacgcattgggccaaaagtatctttaagtccagggcctgaacaaaaatatgaaacagaaggtagtagtacaacaggatttacatcatctttgagtccttttagtacccacattacccagcttatggaagaaaccactactgagaaaacatccctagaggatattgatttaggctcaggattatttgaaaagcccaaagccacagaactcatagaattttcaacaatcaaagtcacagttccaagtgatattaccactgccttcagttcagtagacagacttcacacaacttcagcattcaagccatcttccgcgatcactaagaaaccacctctcatcgacagggaacctggtgaagaaacaaccagtgacatggtaatcattggagaatcaacatctcatgttcctcccactacccttgaagatattgtagccaaggaaacagaaaccgatattgatagagagtatttcacgacttcaagtcctcctgctacacagccaacaagaccacccactgtggaagacaaagaggcctttggacctcaggcgctttctacgccacagcccccagcaagcacaaaatttcaccctgacattaatgtttatattattgaggtcagagaaaataagacaggtaagtctttgctttctagactagcattgaaggcaatcctcattttatcttgaaagttacttttggggaaaaaaagtcaacataccaaatgctgctattagaagataactggagtgtgaaaaataaatgttttagcttcatatatttgtacaagaattggaagaatatgttaaacaatgtggaagaatgttagatacaattttatgttaaaagtcataagaagccctgctttgtcatctaatataaccaaatcatcactgttacatcacttcaaaacatgcagaacaaagtgttttaatttcagtgtcttttcatacattactactcaagtgtagcactagactgtgttaacattccattggtctttaactattaaccttcagtacttacaatgtggacggctaaaatcgttttgcatatccctaaggttgacagaaagatatttaaaggtttgctttggtttttctcttccaggattttacaggtttattatatgacttgtgtggtgggtaataggtctctaatgtaagtgttattttaatgtaaatgcaacatattcttatgctattgttttggggtattttactgtggttttatctatttagagcaagtacaacctagcttagttgtagggagtattacagtttattgtattaaatataatttcagaaggtggctatatattcattatccttgcttcctaaaaaccaggctgtagtgttgttcattttatgatttaattgttttaccgctaggaatatttgtgatgccttctattccactcaaatattttagctctctgacagaactcttaaaagctgtttgtttacattgattaatacttggagttgtcatgatcaaatacgatttattgctgtctaaaggtgagcccacaccatcttttacatttgataagctgagttgagaatatatagcaaatgcagttcaataaatcaattcaggtttgtctctttctagtttagaaattacgatcatggattttagttaatttgctatattttcattttcatataagaattaaatgaatgagtattcgttgttttcttgacctggctctgagaagacaggatagaagatttttttttttttttttaagcagggttctctcttactgttggaatattccctttcgagtatcatttttctgaagactgatgctatcctcattagagtgctcaggagtgcacctattggaaacaaacaagtagcgttattgtcaagtatgtttgcatgtagtgctgttggtggacacttcatggcttctataggtttctactctccagaattttctgtgtgaaagcttttgcttgtcagtgaatagtagagaagagaacacacccacagagtattaaaattaacctccacttcccaatgcagtttaaaaaggacaggatttgatcatgattttcttgctaatgatattgtttcttggaaatcataacatatttcctcttttctacatccttttccatctctcggaactggtgtaggaaaaagaaaatgaattgccagtaagtcggaatgaggattgcgttaggctggaaaagagacaggaatataacggtgaaagaaaaacaaaaaagaggtaaaaggaagcaaaaagtaaatgactaccaacacttagtttcataatttaaaaaaatgcttgaatggatatgcagattgtttttcaattgatactactctgttagtgtagctaataagttgagttgaataatataaaacccagtaaaaatgttctgcatttaaaaactcttccaagtgggaaactgccagttaggaagtcaaattacaaaatggaaaaagtgaaacttgatctctctgaaagaattggcagtcatcaaaaaaaaagaactaagttataaatggttgctggaagtggagggtctgagtaagctaaacctgaaacaatttatacaaaggtgtacatttataagtgagttgtggacttgattcagctagacctgggagacgtatataggtgtttcttctccttctgcttctaaaatgtgagactataatccaccttgaaattaattttgttttgcataataatattaggtcagaaaaccgtgcaatacttggttacttccatcaggcagaattctaatgtgagagtgtgtatatgtgtgtacaacaaggggatgtatctgtggaataattatgtatctacctacctacctaccttcctacctacctacctgcgtacctacctacctacctacctacctacctacctacctacctacctacctgtcatcatctgtatttttgtgtgttctgtatatgctgttctccttaactaaaagcattgtttattgtcttcataagacaatgaagtttactcacctctaactgctcacctatactaatattatttattttctatgagaaattttatcctccaacattttgagctttggcaagggaaaatcctaaagcagatgttcaattaatgaatttcaaggcaggtgtataccttaataaggaaaagtgcatatgtgcctggagaaccaacctttttatgtatcaaggcacaattttccagactggaaagtccttggtgcatgtgtgaacttgtataaatctattcacaggaatagaatacacctttatatatactgtatatccaagtaagcaaaaataccacccatgctattctaaaccaaggcattcaataattttttgctgcactcagcgagtcatataaatcttgtttttttttttttttttactactatgaaacaaaacatgctactcaggacacacttatgttatacttgctcaaatggatcttaatagcaacttacggtgctctagctagagggcaactgtagttagcagttaaaaaaatctgaaagaacttttcagctcataaaagttttatgagctgaaaaatgctatggggtgtgtttaacagtggttcaggggatactgaaaactttactcctgtctatttcaggagtaatttgcacacctgcattttgaaaaattattgaaaggctttctttgtgaacatgcatgaaggccagaatttgaagctgtaggaagagtttcttcaactccagattttttttaaaagagcactcctctaaatcacctgaaatgttacaaggtagtggaacagaactgtgaatgtttttaaaaactgacaaacaggtatttttaaatcaaagaataatttagaaatgtatggatattaaataccaacattattatgcaaatgctcttagttataaccttaaaataggcagcttattaccttttttaacaaacaaattcatatatactacttattatgtgtcaggcctgcttgatgctgtcttgttaggtgttctttttcctactggttttgtaatttgtatctacccaaatgtatgtgtgcaggtgaaaagcaatattaaattaaatgatagaaagattaagatgttggtaaaattattaatgtaatgctattaaagattaattacattttgagaaatatacaaaaagctaaaggcttattgtctaaatatggtgttatggagaggataaagaacaaggaacattggctctgagggcaggagccatctgggcagatacccatatttacatcattgattgcagagtcatcacttttttttttttgcgacggagtcttgctctgttgcccaggctggagtacagtggagtgatctcggctcactgcaatctctgcctcctgggttcaagcgattctcctgcctcagcctcccgagtagctgggattacaggcgcctgccaccatgcctggcgaatttttgtatttttagtagagacagggtttcaccatcttggccaggctgggcttgaactcctgacctcatgatccacctgccacggcctcccaaagtgttgggattacaggcatgagccactgcgcccagccaagtcatcactttttaaaaggtaatgtttatttaagataatctcatataattttttaaaatcacacattttctgttcttacagaattttaaagaacattttaattatagaaaaattactttctgatttgttattataagatccaggtcctttcttcaaacaaaatgttattgagagcccctgtatcttgaacagacaaaagagtagctgtgttggttaatgtttgagggggacatcgagaacctcactcccttgggacctcctcatctcctgtggtggtttttaaaataacatgtacctcacaacacagctagaaaaagaatgatatctagaccattcaaaataaagcaaaaacagttactcattcctgagagaattaagttcttaaaagtaaaaatgtttcaaaaattggtctgattatctatatctttatctcattacaatgatacacatttaacatttacctttgaatagcactatgcatggtgctgaataaaacacattaaacaaatattgtttcaatcttattgatgcctatgtgtcatcaagataatatataatggtatgtcagagtctcacatgtatgtgcaaaactaagtcatcatcaaactcacacttcgggcttcatactttcagaccactttttctatatattatcatgtttaaacttcaaagataatttgtgagacaactagggaaagcagatagtcaaacgaaggtacactgagtctgacattcttggcattgggtctagcagccctggccctctttggagcatttttgccatgaagtgattctctctcctgatgagctctgagaaaacaacaaccccctgcccaatggcttaggtactgccctgtctgtcaattcctgaaagagcaaactctgggaagactggtttctcattggcattctagtggtttgttaagagtatataatttagatttggttgctgctaatatggggcagtatgcatgctcttcagatacctgacatagcaaggaaagagtgtgctgaaattggtagtacgttattctgcagttctgggcagcttctttcctgtagagttttggagcacatctctgaaagtggatgggtctggtgcctgcacacctccgtggttccttttcctgagctccagctgtggctgtctgtcagagaagcacatttttctgcagataattagaatggcttcccccatctctcacggactgtcccaagtctagaaaagaattgagttcctcttctattagtcaaataaaagggaagagaatgtttgtcttcctttcctttctgtagtgttaagaaaataaacgaacttaatgattctaaattatcagtgagcttaacactgtactatagaccaaagattaccttttcaaaaagtcctttgaggtgaaatattttgtatacgtaatacatagatgcacatataaacacacacatatagaatctcaatattttaacacttctttgggtagttgtactaactcactaaccctgaggaaaaagttaagaaattgaaagtgttttcttcaaaagttgagatttaacaataaaaggtgttactttgataactaaaaggaactttattatcctcttcctaaaataaaccaatgcctattctgaaaatggcacttgcaattacaatttgccattatcaaagctaccactgaggtagaggcattatctaaaacaaataccacttatcatttattggcagttacctcgagagagacccatacaccatcttctagcagagcacagtcaatcaaattaccttcgggtaaagctatagcatgtctagtcgtttgacagatattaaaggtggtcataaaagaaacataaaccataggctgtgctccaaaggcatattggccagctaacattaacacaatcaaatacagttgtcatactaaacatatagttacacagtaggtgtatggtgtgacagattgtgaatggtaggtgaggtcagaaaaagaaggaatcaagaaaggcaggaagttacagaatatttcatgagaaagaggagacttacgtcagtctctgttggagggatagattacaatccaattatgagaggccagttattagccaattgcttcccaacttaggctcaccagtggggttaaggagccccaagtataaacagctgtttttctaaatagagtttctaaacagcttctgaaggaggccatgtcatcccagtgctgtttgacatggcctgcttcagaagctgaataccttcttaggcctcacgcagaaactagtacagttcatgaaaacccgagatactctgccagcttcttgaggaagcagtgttgtcacacttttctgagcttcagtgattcacacattttgataagacagcatgttctgtgggttaagtacatttaccttttcaaaatatactcccatgaagtatcatggttcagaattacacacttacaaagttaaatggcataaaactactttgtaaaaagtgcctacactctaaaaggtgatttaaaggtttatgacatcttaattcaagtgaatactgaatcagtaggattatagagcaggtgctctaagttagggaatctggagtcagtctctcctttgcttatgtgcaatgtggacccagggatttctcaatttctctgtcagaatttttaacatggtaaaatggctattattatatggaatgatatttcctaagctctgacacatactctttctccaaatcacagggtttatgaaacaaagatacacacacacacacacacacacacacacacacacacatatatgtatacacacatatatacaggtaatatacagatatattttttctaatttattcaacagtcaaataattacaatatactaactacattagaactggatttttttgaagtacattctggttaatattctgaaccaacatggagatgtagttagtttgctttgtaggatacatggaagaggcagttattgtgatagaaagagcctttggaaagagacctgggttcactgtcaacattgttacaggaggcactctgtatccacaattctgcatcctctgatttgaccaaacatggataaagaatatttgaaaaaaaaaaaaaaagcaccacaataaaaaagaacaatacagcaataaaaaataacacaaataaaaacccaacacactataataactatatagcatttacattgtattagttattataagtaatttaaatgattacttataatacctgatttaaagtatatgtatatgaatgtatgcgtaggattcctgcaaatactatgccattctataaaaaaggacttgagtaccatggatttttgtatcctcctagaaccaatcccccatggctactgagggataactatatttacagtctgtttggtcttgtataaattacttaacctccacaggcctcagttgttatataattaaaaatttataataatactacaacctcaccacattggttaaagaaggggatctttgagtgattgccacatgcaagtcactgtgacaggcatttcacatatttaatactccttcagtgactagaaagcaccaagcacaatgcctgatacatagtaatgacttagtacaaattaatctcctgtgggctttaaaaattatttcatttccaacttctaagtacaggaaaatatagactgttttgttctaaataggtaaaagccaaatgatcttaaaattcaagatcatttatgccacaagaagccaagtataattgtactttagtgtctgcttaactgaaataacttcttaaaaatccgaacccgacataggttgtgtttttttgggtggtgccattttgggtgcaaatcagaagcagctgcagcccttacttaaaatttaaatatagtattggctctataggacctaagagtagaatttattagctttttgcttttcctcagttgtgaaagttgggcttatgattttgataactaccaatttaatttttttctcataaacatcattttacaaattcttgatacatttccccaggtattgagcctagcttcttgcatatttatagaatgaatggacattccctgctgtctttttgttgttgtcaaggaaacccccagttctctacacagggattacattcttctttcttaatagctcttagatcgttcatttgtgcaatgaataaaaaatgtactcacaggtccagacagtgttcagaacttttttggtgggtgaggggcgtagctaaggggagagacatgcctagtgagaggagcaataggaataaaagaaaaggagaaagaaatgctggctgaggttccattttaatgaggtaaagctgaaaaatttatgctttaaaaaagacattgcctatttttgtcactttagaaaatgtataacattacttttcattgaggtcagtgtttcatgtacaaaaatgttagtttttaagtggctttgttaagcgaatagctccaagaatggggcccaggttggtgagggtgggatggatgagggagtggtgatgcgttttagtagaaactattttttcatttctatagaagtatttgaactttttttacaacctaattgaggtgatacaaaatataagaatattccttcatcctggggcatcatgtggtcatctgagagctcatttgattacattaaaaatcgtgttccttagagagagagtgccagtatttagactttttgagtgtgaatcaggagggaaacacacatccattgacaagaagatggatataattatttttaaaaagagtgatttgatcctttggaggaaaataaattctggtggaccttctaagtaactgctagaatgattgggtaatgtatacagcttttgcttctccataaataatgtaagtattaaaaaggagattttaaactagaaggaaggaatctctggagtgagaggaaaagtttaattgtatttcagtatctatgtctatgaaaagttgatatacggtgtcactgtggtatacccaaacttgtttatacacatgtataaccagtacacagtaagtaccatgagtggcttttagtgattttatctttttaccttgtagtacagtctccctggtgtctcacaaggctagtttacttactttggccatatgcttcacatagtaggtttctggaggttttgttttttctaagatgagagagtgaaaaggtaatgtatatttctggagagtatattggaatatagtataatcatcattttcactatgctgcacttcgggacggctgtctattgtattttttaaataggaaaacaaaatctttttgttacacattaaaataaaatccattttaaaaaagaaatgtgatcctaatatatctctgctgagtagattggtgtacatttacgtttaattaaaagctcttaaacttaaattgtaaaattccccaaagagaacgtgaactttaaccagctgcctatgcatcttagcaactatgttttgtgtctggtaacagtatgactggaagacttgtgctctgtctacaaaactttgttatgaagtacttaaaaatacttgtgaataatttgaggtcagctagcaataaagctttgtgtgaaatgtcattaaaaaaagcctattaaccatggtactgttatattcaagtcaagctgttaaaatacattcatataaacatagaaaagattatgcatacaccctgtagagttctgtggtttgattcttgaaatccaaacaaaagttatattgccttttgagtaaaattctagaatagagcagtcttttataagactaagagcttcatctaagagcttgaaatgtcaattacaccattgggttgctctgttcctatgaaatagagcacatctccatttcggaatgagatacctcctctcacagtagcacaggtgtaccccccaacccccttactatacaccgcaaagaaacttttctggtttgcaataatctctgttgagattctctaataacgtgtgtggtgggtggaggtggtgacaggaaatggggatgaagaggtaatttcagaggaagaataaactaagagggggcaagtaggatttggtgagatgcaaggagttagtgacaaatatttgggtgatagggcagggaaaaatttatctgcatatattaatagtagataggttttataccccacctctccctgctatgagatgttaaaagtatgggaagaaattatactgacagaataaaatttagattgtatgtataggaaatgtcagcagaaaattttaacttgaaagccctgggtaattaacatttctctctccttcaaactgatattaagaaatccagccaggtgcagcggtacacactgtaatcccagcactttgggaggctgaggcaggaggattgctcaaactcaagagtttgaggctgcctgtaatggtacccctgcactctagcctgggtaacagatcaacaacctgtctaaaaaaaaattcaataaaaccatttgcaagttgtcgcgaacttatttaaagaataataatagttgcttaattgtgagactattactttcagaaaaaggaaacaaaataatttcaactcccattttgcatattttttgaaattaaagaattcccatttagtagacaattttttttctggggatctaatatacaaaattaagactgtagttaataaaattgcattgtattagagattttgttaaaaaagtaaatttcagttgctcttctcacaaaaagatggtatatatgttaatctgcttccttttaccatctatatgcatcccataacatcatattgtaaacctcaaatacacaatagagtttattttagaaaaagaaaatttctatcatacttattaaatgagcatattattttatttatatgtagattttcttctcaattacttaatttattttgatgtgctgccagcttcatgatgagaaacataagatgaaactgcataatacatttctgttttctatcattttgaaggcaagtcagatcaaatagttgcgaggtgggtggagaaaggaatcctaatctaaatttaatgattagtacatttgcaataagtacattccaaaagtttcccattaaaataggagaaaagagtttagtaaggccagttctctaacttactggcaggaacatttgtttcagagagagagagaggaagggggcaaggagagacttggaaagtatagttaggtctctctgaagttgacaagagagtgtttgccctagggtctgatacataacaggtactcagtaaattttgagaaatcaatgagcatctgaagagatattacattctgggcagcatgcatggttgtggtggtagtgaatttaattttgtgtgcaaaaaccgatatgaagcaatgctgtgtttgtgaaatgtatgcaaagattctgtctctgaaatgcttatactgctgtgattgaaacattatcatatttatttaggttagaaaatggaatttactacatctgagttggtttttggtgagaaattctgatatgatagtctaaaatggcaaggaagtccttatagatctatgagcaattggaagtgttagagttcttgatctgagagaaatatgacctaaaagaatattatactttgttaattggagctaaaatcagaaactataaagtgaatgccatggtctttagtagaattaagtattcttaatatgagttgatagttagctaaattattatacagtactgatttacaattagagttcttctttattttctttcccagaggaaaacaaaaaatttcagtgagcattatgaccatccatcagtttcttaccatattgacatgtgacatgttggcatacctttgtgtcttctttctctgcttttctccaccccactttttttagagccaccaacatacttgacagaacttccatctgtaattactcaataagaagatcatgagatatgtttgtatcagtcttatttttttgaagtaaagaatttacttagaaattcaagtaaatctataatagcaatgagtgttcttaccctattcttggcctaggagtttgtaaatatacaatattaatcagatatttccttatttatccttgtgttttgctggagaaacccagctgaatggctcgttttaacttcattatttacaaaagggtacaaaatatggtagaggttctttatatgcttgacactgacccatgtttcttatttaaaatcttttctctgtacttaaatgaaagttttggtgtcaccaaacagggtaagtaagaatttagtgtacctttgtctaatatttcttaatcatgaattctagttttatttaagttaatgaagcaaaataaaagagttgcttgcatgtaaaatggtagtgtgagcagtttaagatatgcacatttttaaactccagttaaatcccatgaagttgtactgaatagtttaactgagtctggcttaattcaactatattcaaatagttttagcaatgagagactcctggcttggataaaattattgatgtgaatatttcaagagattcttttgtacagaaggcattttaaatgcttctgctcatatagtttaaacattttcttcacattctgttttcatagcacaaagtttaccttcaatgcaaactgaattaagaggatgttatcatctgaatattttatggtgtcctattttaaaacatatacaccatgggtactatatataagatccgagtaacaactttagtgacctaatattgaagaaacctagtctttttagttacctatatttttaaatgacaaggcatttaatcattttcctgcactgagcaattagtaacaattgcaacatctgtgtcagaaataatctgtattcattttatgtttttataacacactagagttatgtatttatctcgcttctctttgtggtagaaatattttctcatttatttgaatacccatatgctgtagtttaagtagttgaaaagctgaatatacagaatggaatggaatggagagagaagaaatgaactgtagtgtgtaaaatttcaataggaagggtgtttagttaggataagaataacccagtcctacacagaagtattttagtgaaataatttagtgaagatgtggtgggatacaaaagagagttttctttcttgtttctattagaataaaagggataaatgtatatgtctttgcattacataaaagtcttattgtctgggttttttaatttaaaaaaaattcaaggagcttctgtggaatttgtcttggtagttcctacacttctatatttgtcttgattcataaaatagattagaatataagcaacactgattcctcttcaatagggttttttcttctctgatgaaacagcaaaagctagatattgtttcttctatacatagaaggaaatagcttcttgcaacaggaacaattcaggagaaaacagttgttttctcccctttagatgataggttgggaagcagggttggctccgtcataatgatttctcctaaacacttctcaggtttggcctatgcatgtgtgttatagattggggatagtttgaaaactcattctgtagtattattcctatgggcagggtggtgagtagtgtgtaaattctttgtcttctttatgggtcagtatatccacaggcacattttcatactgctttgtcactgaaagtaaggcagctgcagtggcaggaccctgttctaggacagttgaatgcctctatgatgagacctcagaatttcctctttcctagtgcccaagacaaggagctttgctgatgtatttctgatagcagaaaaggccattgagcttagtggttggtaccatatggcaatttacaatctgggaaatattctgatgatacatacttttcgaggaatgctagttagaatatttagataggactcctgaactttctttgagaagatgttgatgacaagaactaaaatcagcctaatctgggtcacatcccaggaaggataaaggtctataggtgtggaaggctctttctggtcctttcagtgagctatttccaatagagcccgcctatccagagcttcccactcttgtgcataggatgtggttaagctcatgtctcagtgccacagtaggtagaggatgccattgcaatgtaaaagggctataaataaagctctcttgtttttccataaaacagtctgctctagaacagattataaaggggccagaaggaatctcttctcattttcttattgaatagagagtgtataaattattcccttacataaaggacaattactttttctatatagatcatatatagaaatagagctatagaaaaagtaattaattctatatgatatggcctcaatttttaatttttaaattgtttttatatgaaatagtcttaattttactctttttgcagttcacacaaagatgaattcctgcacttcaagattacattgtatatgtgattccttgcttcattttaaggactatgttgttttcttaaatgtgttgatgagtctttataacctgttttaataatgttaaattgaattcatttttcttattgttaatacaaaaacagtaaatttgaagactgagaaccatataagagggtgattgcacttattatgaaaagatttgaatccttctttgtgtgtgtgggtgtgaccagccttgctatcaatttcttctgtcatacactgccaaattttctatttaagtattgtgaaaactctgtttttttcaggtcgaatgagtgatttgagtgtaattggtcatccaatagattcagaatctaaagaagatgaaccttgtagtgaagaaacagatccagtgcatgatctaatggctgaaattttacctgaattccctgacataattgaaatagacctataccacagtgaagaaaatgaagaagaagaagaagagtgtgcaaatgctactgatgtgacaaccaccccatctgtgcagtacataaatgggaagcatctcgttaccactgtgcccaaggacccagaagctgcagaagctaggcgtggccagtttgaaagtgttgcaccttctcagaatttctcggacagctctgaaagtgatactcatccatttgtaatagccaaaacggaattgtctactgctgtgcaacctaatgaatctacagaaacaactgagtctcttgaagttacatggaagcctgagacttaccctgaaacatcagaacatttttcaggtggtgagcctgatgttttccccacagtcccattccatgaggaatttgaaagtggaacagccaaaaaaggggcagaatcagtcacagagagagatactgaagttggtcatcaggcacatgaacatactgaacctgtatctctgtttcctgaagagtcttcaggagagattgccattgaccaagaatctcagaaaatagcctttgcaagggctacagaagtaacatttggtgaagaggtagaaaaaagtacttctgtcacatacactcccactatagttccaagttctgcatcagcatatgtttcagaggaagaagcagttaccctaataggaaatccttggccagatgacctgttgtctaccaaagaaagctgggtagaagcaactcctagacaagttgtagagctctcagggagttcttcgattccaattacagaaggctctggagaagcagaagaagatgaagatacaatgttcaccatggtaactgatttatcacagagaaatactactgatacactcattactttagacactagcaggataatcacagaaagcttttttgaggttcctgcaaccaccatttatccagtttctgaacaaccttctgcaaaagtggtgcctaccaagtttgtaagtgaaacagacacttctgagtggatttccagtaccactgttgaggaaaagaaaaggaaggaggaggagggaactacaggtacggcttctacatttgaggtatattcatctacacagagatcggatcaattaattttaccctttgaattagaaagtccaaatgtagctacatctagtgattcaggtaccaggaaaagttttatgtccttgacaacaccaacacagtctgaaagggaaatgacagattctactcctgtctttacagaaacaaatacattagaaaatttgggggcacagaccactgagcacagcagtatccatcaacctggggttcaggaagggctgaccactctcccacgtagtcctgcctctgtctttatggagcagggctctggagaagctgctgccgacccagaaaccaccactgtttcttcattttcattaaacgtagagtatgcaattcaagccgaaaaggaagtagctggcactttgtctccgcatgtggaaactacattctccactgagccaacaggactggttttgagtacagtaatggacagagtagttgctgaaaatataacccaaacatccagggaaatagtgatttcagagcgattaggagaaccaaattatggggcagaaataaggggcttttccacaggttttcctttggaggaagatttcagtggtgactttagagaatactcaacagtgtctcatcccatagcaaaagaagaaacggtaatgatggaaggctctggagatgcagcatttagggacacccagacttcaccatctacagtacctacttcagttcacatcagtcacatatctgactcagaaggacccagtagcaccatggtcagcacttcagccttcccctgggaagagtttacatcctcagctgagggctcaggtgagcaactggtcacagtcagcagctctgttgttccagtgcttcccagtgctgtgcaaaagttttctggtacagcttcctccattatcgacgaaggattgggagaagtgggtactgtcaatgaaattgatagaagatccaccattttaccaacagcagaagtggaaggtacgaaagctccagtagagaaggaggaagtaaaggtcagtggcacagtttcaacaaactttccccaaactatagagccagccaaattatggtctaggcaagaagtcaaccctgtaagacaagaaattgaaagtgaaacaacatcagaggaacaaattcaagaagaaaagtcatttgaatcccctcaaaactctcctgcaacagaacaaacaatctttgattcacagacatttactgaaactgaactcaaaaccacagattattctgtactaacaacaaagaaaacttacagtgatgataaagaaatgaaggaggaagacacttctttagttaacatgtctactccagatccagatgcaaatggcttggaatcttacacaactctccctgaagctactgaaaagtcacattttttcttagctactgcattagtaactgaatctataccagctgaacatgtagtcacagattcaccaatcaaaaaggaagaaagtacaaaacattttccgaaaggcatgagaccaacaattcaagagtcagatactgagctcttattctctggactgggatcaggagaagaagttttacctactctaccaacagagtcagtgaattttactgaagtggaacaaatcaataacacattatatccccacacttctcaagtggaaagtacctcaagtgacaaaattgaagactttaacagaatggaaaatgtggcaaaagaagttggaccactcgtatctcaaacagacatctttgaaggtagtgggtcagtaaccagcacaacattaatagaaattttaagtgacactggagcagaaggacccacggtggcacctctccctttctccacggacatcggacatcctcaaaatcagactgtcaggtgggcagaagaaatccagactagtagaccacaaaccataactgaacaagactctaacaagaattcttcaacagcagaaattaacgaaacaacaacctcatctactgattttctggctagagcttatggttttgaaatggccaaagaatttgttacatcagcaccaaaaccatctgacttgtattatgaaccttctggagaaggatctggagaagtggatattgttgattcatttcacacttctgcaactactcaggcaaccagacaagaaagcagcaccacatttgtttctgatgggtccctggaaaaacatcctgaggtgccaagcgctaaagctgttactgctgatggattcccaacagtttcagtgatgctgcctcttcattcagagcagaacaaaagctcccctgatccaactagcacactgtcaaatacagtgtcatatgagaggtccacagacggtagtttccaagaccgtttcagggaattcgaggattccaccttaaaacctaacagaaaaaaacccactgaaaatattatcatagacctggacaaagaggacaaggatttaatattgacaattacagagagtaccatccttgaaattctacctgagctgacatcggataaaaatactatcatagatattgatcatactaaacctgtgtatgaagacattcttggaatgcaaacagatatagatacagaggtaccatcagaaccacatgacagtaatgatgaaagtaatgatgacagcactcaagttcaagagatctatgaggcagctgtcaacctttctttaactgaggaaacatttgagggctctgctgatgttctggctagctacactcaggcaacacatgatgaatcaatgacttatgaagatagaagccaactagatcacatgggctttcacttcacaactgggatccctgctcctagcacagaaacagaattagacgttttacttcccacggcaacatccctgccaattcctcgtaagtctgccacagttattccagagattgaaggaataaaagctgaagcaaaagccctggatgacatgtttgaatcaagcactttgtctgatggtcaagctattgcagaccaaagtgaaataataccaacattgggccaatttgaaaggactcaggaggagtatgaagacaaaaaacatgctggtccttcttttcagccagaattctcttcaggagctgaggaggcattagtagaccatactccctatctaagtattgctactacccaccttatggatcagagtgtaacagaggtgcctgatgtgatggaaggatccaatcccccatattacactgatacaacattagcagtttcaacatttgcgaagttgtcttctcagacaccatcatctcccctcactatctactcaggcagtgaagcctctggacacacagagatcccccagcccagtgctctgccaggaatagacgtcggctcatctgtaatgtccccacaggattcttttaaggaaattcatgtaaatattgaagcgactttcaaaccatcaagtgaggaataccttcacataactgagcctccctctttatctcctgacacaaaattagaaccttcagaagatgatggtaaacctgagttattagaagaaatggaagcttctcccacagaacttattgctgtggaaggaactgagattctccaagatttccaaaacaaaaccgatggtcaagtttctggagaagcaatcaagatgtttcccaccattaaaacacctgaggctggaactgttattacaactgccgatgaaattgaattagaaggtgctacacagtggccacactctacttctgcttctgccacctatggggtcgaggcaggtgtggtgccttggctaagtccacagacttctgagaggcccacgctttcttcttctccagaaataaaccctgaaactcaagcagctttaatcagagggcaggattccacgatagcagcatcagaacagcaagtggcagcgagaattcttgattccaatgatcaggcaacagtaaaccctgtggaatttaatactgaggttgcaacaccaccattttcccttctggagacttctaatgaaacagatttcctgattggcattaatgaagagtcagtggaaggcacggcaatctatttaccaggtaagatcacaacattgataaatctgtttccaaacctggaaacagtcccttggtgctaacgtttatatgtatgtaatttttattgtgatgttaaatcaatggagagtttcatattattcacataacagcaggccaggccacagtattgagttcataatgagatgaaatgacagtaagtatagattagttttggactttagaagtagactttgtatttttctgggttttagaaataatatacaattacaacatggaaaagatgaaattattaatgttataaaaattcaatttgtttttactcacaactagagtattgctttgtcatatgtctcatagttatacatgttaggtttaaaagtagaaaaaaagtcctatttttaaaaaccctcccattgatggatgctattgctgtagtatcaaaatctgtcaggcctttaacatttgggagtagtacgtagctctaataattatttcagagtttgtgcagtatcaatatcagctcatacttatatgcaatgtccttgtttaagacagtctacataatgcatcaaacacagtgcctaccagtagtgagtagtcatttattatataaacatactgcctgttgagagaagttttctgtgtatttactgaatgtatggaaagcatgaatttgatactgattcatataagccatctcttctgattgccacgaaaaggctataaaagccctgtgtgaaagggtaagaggtgaaggttcagagaggttcagcaacttgcccaaggtggcacagccacattgtggtaaaagtaggatttgaacccagcttagctccactctaaagtccatagtcttttcactgctctttgctggtttcagtatagtataaaaataaacaattgatattgaataatatatgaaccaggaatcttggaatatttactttgtagaatttattttcctcttaatctagcctgagaatgttaagaaatcagctctaatggtgttttcccataatgttattatttaaattaacaatgtcagtggaatccacaaatagacatcaccacctagctgctacctgcaaaaagaggaagaaaaatcagtactttaatgtctgtcttggttgagaatatatgttttattttaatatgttttatgccatgactatcgttaaaattattcttctgatcatatcaatattaccttttgtgccaccaatgctttattttgatgtgcttcagaaagagtaaaatagaaagtacaatttttaataaatggcttgaaatattttgaggaaaattgatcaaaggtagttgacattgggttttttgttatcactgtgtgttaaatctgtaaatgataatctagtaatttggctaatatttattgttttttaatttagtttaatatacttcagtttgttaaaaatatgatgtaaaaataactggtaataactaggtacatatagagttaagtttgatgaatgagaaatatgtaccaattttccagtttacaatatttaccaagatttatagtttgcgtcttcattgcaaaacaaatggtcactttagcttaattcagtaaacagcagctcatatgggattacctggtctatctgttgcagattcaactttcagaggttaatacgaactgtttaggggagaataacattcataaaaactgaagtttcctgttaattggaacgacttccagttcacaggaagactcactcactcagtccttgtttcatggtctcagcatggtgtctagtgtcagtggtaggaatagtaatagtacttcttcacatttgtgtggcacatcacagtctgataaagcactttcacctagtgtcatttggattcagcacagagggcagcatgtggctatggcgtgtgttaactgcagccttgtcatcctggcagcgagcgtacttgtactttaaaattcagaaagctaaaattgttagggagatttcaaatagttttggaactataggaaaaagtgtcttagaaaactcgggggagtttttggagaagttgatgtactcatctgaattaacctaattttaacgtgaatcccaaacatgggaatgtgtacctatccaggtttatagtcattcagaatttacttaacactcagaaagtttgagtttgactttctggtgtggggaagtctcagttatcttttatagcagtaccttgtttatcctgatattctttaagctaatgtttcataagaagttagacatctttcttctttcatgtgtaattatttcagggtttcaggacttaagattcttgaaagtatgggtgtattccatagataatctattttatttcaattattttgtaaaactttcaactctcatttggatctttgaagatttagaaatgtaagcaagtctgaaacaatatacaaagaataagtataaactcaatgaaaatacacttatccaagcaatattgcaatataaaatatatgcttcaagtggtgtaaaagtgtttgcacttagaaaatatatttaaactgtttgtcctcataaatttatgtcttcggccttcatatttatctcccaggagtgtcggttttatttgtattttaataagaaaattataataaaaacttggggtttcattttaggtgaggtttttgtatttgggtttgtttttctacagtagagtttaatccatgtgttgcttttcttcaagtatagtttaaaggagtacatttggaacgtgtttttggaaaaagcatgttaatgtagcagaagagacttcagtgcacactttcgaagaaaaacagtttctgagcattaagtggtaaaaggcaataataattcaaatgatgataacaagccaacctgctaaaaagaatgcatgttctgtgtatccagccatttcacatgaactaaccccatttaaaagaatacattttccattcactgtgcacatatgtgtaatcatttttgactaaaatcaattgccattatcatgccaactaaatctgcagtagaatatattagttgccagatacagtacaaaaaatatcatttaagagtaatcgtgattgaatcccagaaatgaatagatgcaatttgtaacaattagttataatgccaagaaacactccagagagtaaagttaatgttaatttttatatgtagtaactctaaattgctatggtaaagcctataatatggtagcaatatggggcgttttatgctaaaatacacgcaaacattagagacgagcctaactgcttttcttactttcctgaatatggtaggacctgatcgctgcaaaatgaacccgtgccttaacggaggcacctgttatcctactgaaacttcctacgtatgcacctgtgtgccaggatacagcggagaccagtgtgaacttggtaagatggtacttggctgaaaaggtgcagttctttcacagaagatatattgggggagaatttatgttgtcgaatcaatcagagatttcaaagaaacccatatgaagattaattatatgttaaatgaagttaaaatctgagggtaattaactaggggctggaaaatgggtacagatattcagtgaattctgttaacgtaaccaagactcagtgaggcctgctgagtcttcttgtgttttttacaggtagaatttacaaatgtaaaaatgcataaatattaacaaaaatgtacatttatcccccaaatctgcatataaataaaaatcaatttcagtataaaaatctttttagaaagctagacttaaaaattaggaaaataataaaagttagagagctttgtccttagttttgggataatttttcttctcatttggaatgggaaagacccttccctgactcccagcaaccagcccaacgtgcctcggcctcagggagctgtgcaattgctgttccctgcctctcttttggttccaaggaatataattgaccctcacactcccatattcttatttaggcatccttctctttaaagaaaaaaaaaaaggcaccagtgttgatttggctacatatagacctcacttctgagaaaagaatgatgaaatatgttgtccagatgtcccttttagagatatcatgaaggtttgcttaatttgcttacaatgattgagtaaagaaagctcaccaatagcactttaaattatacatcaatattgcgatacaatcccaacattcatattaaaagagtacttaaaaaaagtcaacgaggccagcgcggtggttcaagcctataaccccagcactttgggagggcgaggtgggcgaatcgcttgatcccagaagttcgagaccagcctgggcaacatggcagaacctcacctctgcaaaaaaaaaaaaaaattaaccgtgcctgtagtcccagctacttgggaggctgaggtggaaagattgcttaagcccagaaggtcgaggctgcagtgagctgtgttcacgctactgcactccaggctgggtgacaaagtgtctggcactcagcaagcaccataaacatgtttggtattattactatataatatcatgtttactaagaccatttctttaggtaagaatacattatatgactaagaaatttaacttgctttgtatattcatttaaaaatattcttaaacattaaatttttagtgtaattgcaaaatgctatggaaataaagtcactaatttcatcaggggagatcatatgtagaaagattagaatctgtgtagaaagattttatttgacatagattttaaagttgggaagatttgacaggtggtggagggagatatggacacaacaaacaaaagcacagaggccaaaaactacagaaggcatttgaatgacagcctcgatccaggtatgcctacttaggggtttgggagagggagacgtattgggagacagtaccagaaggcaggttgggtctagaaagccctgacagtctaagaaggtcctgagttcaggatactgaatagtgttacttcacactctagtcaagtgattctgagaccttagcatgcatcagagggctggtaaaacagattgttgtctccacctcaaagtatgtgattcagtagatttggggtggaattggaattgtggatttttaacattcttaggtgatgctgatgttgtttgtggtccagggagctcacgttgaagactgctgccctgggcaattgggatccatggaatgtttggaagtaaaagaataaaattatcatgactgtgtctaaaaaagatgacatttagcagagtgatggatatattggagaggaaagggcctagggatggtgaggccagttagatactttgagtagtccatgtgtgaggtaatcagagaatgagccatgattggaggtgggaaggctggggctgttgattcttcattcgttttagggcttatctgattcatttatcagcaatggagacaatggccctactctgaatacctttgacattttcttagggttgccaaatttaggaaataacaattcaggatggccacttatatttgagtttcaagtaaaaacgaaataactttgtagtataggtttgccctaaatatggcacggacatacttatgctaacaaattatactttttttaaaatctgaaattcaaatttaactggctgtcttgtatgttatcttgcaacctcacactaaatggaattctttgatactttttgaaagtattttgtgagcttttactattttgtttcagattttgatgaatgtcactctaatccctgtcgtaatggagccacttgtgttgatggttttaacacattcaggtgcctctgccttccaagttatgttggtgcactttgtgagcaaggtaagagctattgcaacatttgtatgatgaacattattgatttttttttagcaattttggcctcaatgcataatctttcctgcagtggaaattcacatttccttaggtttccttattcagggatagctcaaaacatctgaatcatagtgttgacttgattatggttgtttagctgatagattggaattgcaggcaggcaaactgagctgaatttaaagacatccagccaataaaaggaatattatcgtatgtatttttcttggggacaaactaagcactgaccttactgtggctcatgtacgaaggagtactgaattcaatattagctgtttttattttctcctcctaagcacttgagactcaatggacttatttttcatagtcaatcatatctggagaatgagttgatatagttgttagaatacatttgctttggcacatgctaagtagaagatattgtgaatctgctcaccaggaaattttcctactaaagaaggattgactttttctgaatgaaagaaagccctatgttcatgatggcttgaatctcatgatccctgtaatttgcattttacggccaacctgagggtgtattttaggtggttaatgggagcatttcttggtccatcaataagaaacagattgcatgctaagcacactcagctttggaatgtcgatttcctctacttaaactcgtacagtggtttggctttgataaaagtgttcagtgccaaacttccattccaccagacaaactgaaaatgcattagacactcaggcacattggtctggtcccacattctgcttcatggtgttaatctggatgtcactgcgatgaatgcaaatccaaaaggagcatgtattgaattgctgttccaagtggatggatgatggctacatttttaggtgttggtttttttctttttttattgcatagggtaaatctgtttgttttagattttgaatataaagatagaccaagcaagatcctcttcttaaagtaaaaacattagaaagatggcatttgttgaagaaaacaaaagcctgagacagttgagacattccaatatgttaaacatgattctggcttctgttagttccaagtacaagaagcaattcaaaaaatcgttttttcaatgtgcatttactgtcttccaggcactgttctgggcattggagatagaaatatgaacaaaacaaagtctctgatcctggtgacttagcataactcttggcagagaataaaatttagttctttacagactatcaaatgcatcctggcacattgtttcatttggttggcatagcatttctatgcattcagtgggctagaaattaaggctcagagaaaaaaagtgatgtgtttaatgtcacacagctagtaaatcgtacaatgggaaaagtgaacctaaatggcttaactctacagcccaagtttctctgaatatcttcacacttctaaagtaactctcaaagataaacactttatttatatgtttatctgatgcattgagtggcaacagatttttggaagggactttggtgccattgaccttttctctttcttttcaaaagaatattgaaagtaaaaagtgttaattaattttatttctggtgccacctgactttcaggtactttttattgtattttcaagcaagtttgattttcatgcacatttttttgctgagaaacatcgatctcagtctgtttacgcagtgcagctgtgctcctgtgatttattgccaggatactgaaagatttttttcctcttttcaggttgcctaagaacaaatgttttcttcattaacagcagctttgttgtctaaacaattttctatccaaagtttggtgatgaccgtgtcagtgttccttcagctgacgttttctgttctctgactagtaacttcccaagtcacagttactccgaaataggggacacattttggtgcaataattacagatacaaaatctagaaagggctattggaacagtagagaggcagttctggctgcacaaactgcccttgccaaagtcagtgatacagcttgcctagtgagaagtgtggaggatgggcactttcttaggacttgacagctatatgtcagagaggttgaaaacattacctgtacagcatcaaaagaataaatttttggtgaatttgtttgtgatagtttcaccttctatgttcatgaacaggagctgtgcacactacaaatctgggtttgtattgtaacccattgaaacaacctatttttttgtaacctctttaaaacctataggagttttaaagcataagatgtctttccatgcattgaatgatttttaagaaaatgtcatccacaaaggttgccttttaataaataaaaagagtttcacataatttttaggtaaggttgaaaaaacaaatagactatttctatgaatagtatctcctatcagaatagcatcctgggagatgcagcttgacaaatgatccttcattacatatttgttgaattcatgaataataaaatttaagtggccaggcatggtggcttacgcctgtaatcccagcactttgggaggtcaaggcgggcggatcacctgaggtcagaagttcgagaccagcctggccaacatggcgaaaccccatctctactaaaagtacaaaaattagccgggtgtggtggcgggtgcctgtaatctcagctaatcaggaggcagaggcaggagaatagcttgaacctgggaggcagaggttgcagtgagcagagatcatgccaccgcactccagcctgggtgacaagagtgagactccatctcaaaaaaaaaaaaaaaaaaaaagtgaatcaatgtggatagttggctttgttttttttttttttacacaaaaaccactctaagtggtttttgcagatatatttatagtcattgggaagctatgatttagatagtacaaataaatgcattttcccagtttggttttaacagaaaccccgcctctattttttggacctgtgttctgattggaatgtatgcatctgctaactgagacaggcactgttagtagtgaagtggtcacatatctaaattttgtgatcatctgggttttcttgtttaggaggaaaaatacttaatgataaactatttagaagacaaaaaggggctgggtgcgatagctcacgcctataatcccagcactctgggaggccaaggcaggtggatcacctgaggtcaggtgttcaagaccagcctgggcaacatggtgaaagcctgtctccaccaaaaaatacaaaaattagccaggcatggtggtgcacgcctgtagtcccagctactagggaggctgaggcaggagactcacttgaacccgagaagcagaggttgcagtgagccaagatcatgccactgcactccagcctgggtgacaaagcgagactccaccacaaaaaaaataaaaaataaaaaagacaaaaaaggggaaaccaaactaaaaccaattgggttaatagcagataaaaaagggtatgtagaaaagttttttctgatgtattattcaaggggttaagatcctccataattttacatcatgtatcttaaattaatgtccatggttaaggaaagttatgccattataaatcacattatttactttggcagtaagaatgttctaaaagtttttttgattctcctcctctgtaaactaaccccctcatataggaagagctgtgttcttcctagccctctcaccttacctctaaattcttacaaatgaacttccccaaagcagaaatactacatccaagtagccaaaatttgcttcattttgaggcactgagtgctacttttataccaaaccatctagctgtgtcttgagtcctttcctatgagacttggtgatctccaaacaacactttaataaacgcaaagcttccagtgcacattactcaaaagaattagtcagctggctgcaactaaacaacaggcctgatagactaaactgaaataaatactgctctcagataagctgcatctgttgtgtgagtatggttttaatcactgaagccaggaaagaaatgaaatctttcagaattcatactttcccacagttatagaaagaggagtaacaggaataagagtcaagagacaatctgagtttcaatttggccaccaaaactaacgtataaagcaaacatttatttaatttagtagggttgtgttttcttctattaatcagcaaatttgggtggggggagatacttactaggtcatctggaaggttttgttggtgcctgaaattctataaactgcagttttgttagtttttacatgtaactacttcaatataattgtggggtgtattttgtgaaagtcaaccccacctgtggatgagcaattctgtgggaagattgccaatgaagaatacagtgctatgaacaatgccactttcttgtggaattatgtaaaaattggcaacctagaaagtgtagctgatactgccagtgtaaaatttagatatatttgaaaaatattattgtcccactggaatatcagttatagtgtgcttattgtgaaacacacacacagacacacacacacacatatgtatatgacctggtggaatgggggggtgagttaaataatttaatttatttcatttttaataaacttaaaatcttgatgcattttcattgggcattacctatcttacccttctttttaggaagaaggcatacagttctagctgtatcccaaaacgtacctattcataaaggatttttttctctttgtcagttttacatgacaagagcctgtgacttctcagatatctctttgggaaatgggagaggactacttccagaacctttgaagttgttatgcaaatagggcattcataattctattagccggaactcttatctatcacttgaatgagtctcttagaaaagttgtgttggtaaggaattagccccagttgcttcacaagtaagtcagccagtgctatagcagcccaagagattttggctggcccctcttccagttttctctggctttaatcaaggaagttgctgttagatgctgcctttgcaatccaaagatatatagccatccacttggcacgaatcagttgggctcacttcataataatttctttgtcatcgtgaccaaattttatgaatcagttacttcagggacattgcacagatactggcttgggtatcctactaacacttggttgggggtgccaagtttgaatgacgtatgtgcgtttaataagctcctgcctgtttcttctcagataccgagacatgtgactatggctggcacaaattccaagggcagtgctacaaatactttgcccatcgacgcacatgggatgcagctgaacgggaatgccgtctgcagggtgcccatctcacaagcatcctgtctcacgaagaacaaatgtttgttaatcgtatgtaccaaatagatacgagtttccaggaacttcacttctcatcactctcttagttttgtctgtgtgcaagtgaaaagaagtagctttttcaatcataatacaacttatcaaatccctcatctgtgaattacttaaaatcatctcacctatgttaagtcccccatttggggaaacattcaactataatataggtaggcattggtttgtctgccagcagtaatagttgaaacacttgctgtaggttgaatcataagcagttgctatttgatcatttttaaatatacaaaaacagctatttcttatggctcaatagaattcttactatggttatactttcatagtctctattttgaatatttatatgcctgtctaaaattacagttgttttcagttatttttgtcctgctaattaaaattgaattgttaataatagcaccctaatcttaccttttgggcatattgattctcattcaagtttctaaatattttaaattgtggaaagtgagctacatcctaagaacttgaataggtggagattgaaagctaatgaaacttaatatcagagctgtttaataactccttcaactgcagcaaaaaggagggcaactagttttcatgtagcaatatgtagaaatttgttgctcataaagcattttcttaagaggtagtgtcttgccatgctgtccaggcttgacttgaactactggcctcaagtaatcctcccacctctgcttcccaaagtgctgggatcataggcgtgagccaccattcccagcctcatgaagcgttgtttgatgttctattaaatattttctcgtgatgcctactatcgtttagaagtttgttaatttgtaatctggatagaggttcatttaactttactgcgtgatatccttgccagtgactcacctcatggtaaaagtaaatatttttgaggataaatctgtagaactgtctaatctaggtgttcactaattaaaatgttttgaaaaaaaggaacaagtggcttccaaaatgagggtagcgtggataagatctggcacattttattgggtcactgaatttttgccaatggcatcgcttaaaaacaacaacaacaaaaaaatagaaaatttctatcataaaaaaaagaaaatttctatcatgagtgagggtgggaaaaaatttaattatagtaaattgctaggggaattattgtctatgtcttgatattttaatgcttcacagggtttgcacattaaccttttcatttaaagcacattgggcagaagaacaaaaggtagactaggagagatttttatgagcaactaaataaaaatccagccagtaaagaggatgcatgattcatgctgaaaataattttctttgatatattttcatccatatatggaaaagtagtacaaatatctgtgtggtttcctatcccttaggtgtgggccatgattatcagtggataggcctcaatgacaagatgtttgagcatgacttccgttggactgatggcagcacactggtaagatgcccttgaaaatgatgtcaagttctaccttctggaaatttggtactgtgcactgattgtgcattacagagggtgcattagactggaggcaagttaaatgacttgctcaaggtcactcagtgaaacagagaagggttagaagagttccaagctacctgatccaacatccagtcctctcttcaatagttgtggttctcttcaaaagaggagtgtaccagatttctatcaaaccagaaaaccagacaattagtagaattgccttgggtctgtctttcagatggttatctttgctttttctagcttcagagcaaaaagagaagaataaaatgtagcagaaaaagtcattttaaaaaaatacctttccgtcttaaataattcactggaaatccgctataaggcatgactcatttccaagcaaaaatatccatttatttttatcttaaagaagactgttgatatgatcttgtgaatttctgccaactaattacatatttcaacttgttttctattttttgaagaaagaagtgacttggaaatgctggccacaactttgagtagactgtaataggttcttagaacaggtgaagctgttttgagtcactcttactaaactcaaataaatctaatttttataaagagttcaaatatgattgtctatactagtggtactcagtgctggctgttcattagaatcacctggaatatgtaattaaaaactggtgcttaggccttatcccaggtccattacagcaaaacctctagccgctgtattttctcagtgttccacaggtaattcttaaacgcaaagttgggatccactgggctagatagtaagtgtaaattaaattctaaattagaaacaaagtgtaaaatattgaagataattttaaaggcctttttgtgtttttattacttaggtattcagtttcattcattatctgccacttgtttggattcaatgagtttggcaaaatataaaattcattcaaaaacagatgtcaaagtaatctctgcttttggaagttctgctctgtcttaagagaagctgctccatcatggacacactactcactttatctatgtgccagccactgtattaagcacttgcttatgtttattccccacaataacttttaagagaggcaatgggttttccttcacctgttttacaggtaaagaaagggaaggtcagttaggttgagctatttgcctggaatcacaaagctgttaactgatgaagccagaatttgaacttaggcttgtctccaaagccacagtttcttctgaccggtacctcctcggctttaaaaagagtgtatcccttgttacattttcgctttgagcaacccaaaataagacctgagtttctctctctgtcaccactgtttatgtttaatcagcactgtttcactgtttgtcattcaagttcttaagtaggttatttggcaagatgtgagaaaaatagggaaaaataggttgttcttaaaatatgttcccagtaagcaataggaaacacaaccttagaatcaataggctcatcttcttctattaataattgtcctggctggatgtattggatctgtatctgcaattgttgcctctttatgttttcattttgctgtacttagggggataatactggcctattagattaatagcgattggtatagcatgaatctttatattacattaattttaattgaagataattttgatcctattaatttaatttctaagtgaacatatgattcagagattgtttctatatattataagctgtttttataattttattaatgtatatcatacagtgaatgcatttaatgagttttccttgttaaatgtgtacttcattctcatggaatacattgggttttagggtgcccactattaagtctacctcccacgaatttcccttatttatagcccagtgaaaagtgcagggttttgtgagcccccatcatgtatacagaagctggcatgcccaggactcagctggccatttctatctagttactgcttatttgtgcctggcagatgcagcccatgacttatcccaaagtgtacctgttgtctgggttcctgtagattccagccctgagcctagaatagctgcatttggccaggtggagtgtacgaaaaatctttttttcctacacacttacctgactgaaccaagtcccatctatttctaatctgtcattggttacatagatttgatgtgtgtgtttttattcttagcatgtatgtgtgttactagatgtttattctggtctctcccttagcagttcacctcttcaaagaagtaattctttcccctgctttttatttctcgtggtgtctgaaataaagtgttatcctttattcctgtgtgcttggttaaagagacttcatattggcctatatctggcagctatgtggattctgtagagtatcttaggaaaattatcttccctgccaagtgccatacaggtgagcttgattcatcatatgtcattattcccctatgccaaagcaaggcaactcaactagtttttgtctgtgtccattaatttttaatgtaggtacacaaatactctgaaaaacataacagtgactatttccatagtctagaaaggtcctaaacgtggtaaattagtgagcatcgcaccttgtcaaaaaagaaatattgatttccctctgaaattttgctctgaaacttccagaggaagataacataagctaacatagataactgtacaacataaacaagaaccctactcttaattagttggcactttcacttgaaacgtaaggattatggagaatgcactgagggcctcagtttgaagaagacacatgatgaaatgtattaacaagcaaagtttatcaaagaaatgacacaagtaaatccagaaaaaactctgacagaccctcggtttcttcttaattcactctctgtgtaaaataaaagtgtgctaaggaatgtcccttaactttgaaaatactggaacagaacagaccatctgtcttagagccggtctccctcgcattcaactgatctcctgcccactttcttgcttttgtaaccaccctttcctctatccttttcctctctgaaacagcctaggtgtcccttaaactcgtttgtagttttttctacagtcaccatccccttaacgggttccatatgtgtgcaggcctttgaataaaatccttctgctttgtttcgctgtttactccaaggtttttgcttttgaaaatatccctaacagtaaagtcttggtcagggggatcagtatctgcttatacttggaatggtgttaacttgactgtgtgcagttttaaggactttgtttatgttttggagtgatttctctcctcttccacaccctctctatctccatttttttctttgaaagatttattagagcttctccgtcttgggtggtagaacagtattaaaacaaaaagaacctttcatatttaccttaaagtgtcttttgatatttagccttacaatccagtaagaagaaacaagtttatattaggtctcaatttcaatgatccattttactcaaataattaaactttgctttcaataaacttacagtataaatgtatcatatttaatgttatgctatacagctagactaattcaactagtatactaaattaatgatgttatttggctaagttatctaaattgcccttattcttgagattctgatggattcattccacattactggcctctataataggatgttgttatcattgatgaaatgccaaattctcatttctgttatatttttaaaatctattactttttttatttggggtgtttgcccaataaatttcacaaaagtgaattcatgaataaaattgtgcctagccttacccttgtgatttatattaagattatttcttttaatacatttcagtttttactttgtcacttggctttctcctaacctagttattctttaacttgactattgttaacttgacgattgttctctatagcaaaatgtgcctactgctttattggaaaccctaacaaataacttcactaatgaattgctttgcttgtcacccaagtaatatcttcaaagacactcagttaaaccatccaagttaaatatacattaaagctggcaaacttaaacaaacttttcttatctagcttatatactgttagctgactttaaagttctttcttaaaccaactgttaaatgaatgactagtcagagtgttttctttcagatctgttttccagtgctaatgacctttcccttccctggctatgaactcttgtcgctcccttaaaattcttcagtgtctgctcattgccttcagtataaaatgttaattattagtatggcagacaaaaccaatccactccgtctgccacttcctgagctatagcatctcaaaatactctcagctcctggaataagccatgggttctcactcctgggcggctttgcctgtactggccctagtgtttagcatattctcacgtcttatcctcatttcatctcacaaacagtcaaataccctgcatagccaagggtctccttccaggaagccttccttgctgggaatgactaagagctcctcttctgtgctcccacatcttttttgtcctccacccatcctaactcaggctcctgtgaaatcaacttcctgacactgagtcttctgagataggaattaactttcgtctctgttttttcagcaactagcagagtagttgacatagaacaggtatttaataaatatttgaatgaacaaatgatcatcagtatacacacattgctcagccaactctatcttttgaatcctgaaatgaacacattatgtctttcagctgaatctctttgtgacattttttgcctaaattaaagattttatttaaagttgtaccagtatgaaaaacatcaaaacataatagatgggttttacggtgaaaagaccaaaaaaaaaaaaagatattccttaaaaatagaagtatatagttgaacatactgcatcttataaatgtatcaacccaaaggaaaacaagtgtttttactagaaatgatgacaattttgtccatggttgtcctagaaacacctttgcaataaactttgggaattaaaaatggaaagtaaactttcaacctctgccacccctgcaggtttgagttatatcagggcaggttttccatgaaactttaagaaaccaacaattactcaaaactttggaggaggatttttttttccagataggcacatattccgtaggtatactttctgaagaaaaatgagttttagaaaccttattatttatatccaaaatggagtgaaacaaacaaaaggaaatatcactcccaaatattatcagctcattttactttttatagatgctttggctaagggtgatttggttgcataaggtgggatagggcttcatttgtaaatccactatctgaggctgtttattcaagtgcagaggaagccagacaggcagggaacgttatggaatcatttatatttatctgtcagtatacctcctggcaaaatgattttcacaacactgttttcaactaaagactatagtgtctatgggacagcccaattaaggagctatcagaaactcttacatgctttcatcatactgttctgtctgacaaacctctccaacaagtggtttaaaatcaaattgtggagctcagagatttaaagctgtcatattgcttccttctctcttggaccctctggagtaagattctcacgaggcgattctctgggctccacattgttcctttcttcaatgattccccccagcaccatcaaagctgacccttccccactggacactggtgtcttcagtggatcagacgcatttacttcaaagggaaccatcactttagatggccatgtatagaggccgaggactgaataaaactgacattgccattccatttttaaaatattggggagtttttggaatatttagtttgttctgcagaaaaagccctgactttattcctaaacattttaaaaaacattttctgcatctccttcactttttttacttctgtcatctctacattgtcaggactcaaatgtcacaccccgtgaggctgctggcttccctgcttcctgggaaattatcacagcttccttcttctcactttccattctacagttgggagaaaacagagagactttctctcttctacatttgtccaaatctggtcaggaagttctagaacaagttactaaatcacagattcataaatatcttattttctagctctaaccaactcatcttgctatgatagttgtgatataaactaaaaaaaaaactaattgataggacaattagtacaattaattgtacaattaaccttcattacttaaattcttcttaaaaatatttctggaagataactcaattttgcattttgtttttcattttggtaagcatagttcagctttggcaacttaatacctacaatttccaacacccacttgtcccccttcaccagttgattcgagttgatgcacaagaatgtccagatgtgtggatttgactttaaatccagaggctccttcttcttctttcataaataaacacatcagtctgtcaagcaaagtattgtgagaaaagccagctttgaaaaaggtagaaacaataaagaaatagcccttacccaggaagagacacttaaaaggggcagaaaaaatggagtaacaaatcacggaccataaaccattattgtttttctgcagcaatgtatcattattaccctttcataaacacaaaggttcttattccccttcctctcccagatgtcttggacattgaaaagagaatacggagtattcattaattccagtgctttctaagcttgttgtagatttctgctcatttgaaaggatttcacatgatttgacagaaaaacaatgcaaaacacaatccccacaacaaaaatttaagttttccttttcctacctgaagatcttagaagactttctatacaacatttgcagatggatgtatgtcagctgtgatgtggcattagctctaagtcaaataccatttctctgtgaacaagtcacactgcatatcaacattaatttaattatgttaaacttcacaggctttattgtattaatccaaaagccaaggaaaacatgctcttttctcattctttaacacattactcatgagtggaagaattctcagattcccttctgtgaaagactactgagttcttaatgaaaattttgacttgtgttgtagtttaatttgatttggaatcaagaactgattcttctgattctaaatgtgagatattatgagtcatagagtagttctagaacgcaactctgctctctgccttgtctttcagttcagatagctagtggtgggttgaacagctggaagaaccatatttactcactactggaaaatcattttataattgacaagattattataaagaataagaaaaggagatttagtgcagtagcatctcacagatgcttttccaacagtcttctgtgcaactttaaaatctcatgcagatatttaaatctaattgctaattagtttaaggcaatgcataaccatggaaaaggccaaaaaaaaaaaatatattgaatgagctttggcagtctctccttacatttggatcgtcagcccttcatgactggagacctgtgcaaataagcttggggtaaaggagcctactggcaccattcattctatggattaaatgcaagttgctctctgggcctctgcctgaggccccctctctcacagtggtctcacagtgcgagtaactcacatccttctgaaaatgctgttgataattgctgctttgtagggcagtgagctcacactattacacaagattagtgctgttctcaagagctggccagattgtctttcccgcacagaggtttgccagctaggaaaataatgggcatattgccactttaacaactatcaggagaccccaagttagtttttcttcccttcagcatattcatgtttgtaggatccaactccaggctgccagcatagggtagtgacaccaaaacaaacgtctctttctcctttaaaacaaagctgctcttttcttttcagttgtcggtcaacgaattaccctgttcaactaaaagacagcagcaaaaccataacctcccttaaaacataaataaagaaggacccagactagactaaccttaagcaagtacaaggatcagaagaaggtttatctttaccttgcagggaagtcatttgcccctaacaaacaagacaaagttaaatgcaccactccccctccagactgcaaacaaatgcctattgtgtacaccagccatctagggataaaaaagtcattttaaaggtaccaaatgttttgatttctgtaataagtagtcctcatagcctcttttcagataaccatttgacctgtgttctgaaaggctgaggctaaccccaagtggttattctgtttgttatttagtgaaaagatggtttcttatcggcatatgtttcaaacaggtacctgtcctcttgggaaagtgttttctgtttggaatttgctttcctacttcggtggttatctgcttgcccttggtatccagtgcgtttggattgaattttgtagctctgggagtacagcagtggcaatatgggccccaggtgatgaaaagagtttgcgcacaaagaagtcagctcttactgcaggtgtcatgttttcatagctaatctagataaatttttacggaaaaacaaactaactgtgactcacgctgcagacattgcatttgtgtgcttaggtgtttatctatgatctgacctctcctaaggattttaggtggatgttgcacatttggctttggttctgatgcaatttcaccattgatgtaaatcatcggataattttaaaagacagagtggaaaagaagaaactaccgtaggtgaacattttagacagaaagaaaattcagattatggatagaatggcttgcaacagaatagaatgcagtcaggttggtaaatactggttcaccgaggtctgtcttcttgcaaagtgttctctttgtgttttcactcacaaaactgagagaacatatcccagacaatcttttattttttatttttatttttttatttttgccacatggagtacataattacgattttgggggacatattccaagttctcttttgttaagtggtgtagccgttaattcataatgtaagaatggatatatatcaccacctagtggtcgtattgtattttgtgtttcaaaaccacattcacagaactacacccagatacacacaagaataatactatctgtaaatcaagttcctgtagttttgaatagtttcttaattctagtataaattgcatgatactgtgatcctgaaagttaaatgtgaaatgagaggatttttcaaatgcagcatgaagctaacacatgtagtcaaatacttagtaaaatcctagcaactaaggcaaatattaggacctatctgtcctgtgttttcactttatacacaatagtagaacgctggagaaagttttctttggctagtttccttgggaggtgaacagagagggcttttgcagggttttttagatgtttttttttttttcactgtgaactaaattagcaatgtttggaggaaaacagagtaagtgaagagcagtgactgaaccgttcaagagaaaaactcccaaattatagtttgaagttcagtaagttctcccaacaattaaaataatgtattgtgaatggcttgactacacacatgtcaagaatggtttttctcaaagggatgtgcttggcaaaattcataaaatctataaaacatcatctttaattggccatttaaggtaatctaaactatggcgaattttaaaaaacaaaaggtgactgcacctaagctgaaaaattatagataatatatggatagatagagagagagagttggaaagtaggcccttggcagttacagattcaagatttgccgccccagttatacatgagatcctgaaggtctgcagtatgaaaacatttgtactttttgctcaggcacaaatttgaactgtacccaatgactggctagtgtgtaaaaactctcagtgagctctcaagtctgtgtattggacagctcagttttcccatcacaagaagtaggttgctgtctactctgctgaccattttgtttgttctctactgtatttatggcaggaaattatctgctacacagatgtgtatgaatggaagcattaccaagtcttaggtcttaggcacttctttaatgccaagaagtattgtatgtgtaagggtgtgtgtgtgtgtgtgtgtgtgtgtgtgtgtgtgtatgtgtgagagagagacagagtctcaaatttatgactcacaaaaatatgaacttgaattttgtctagtgtctatgaaaattctgtctctttttatttatattgtatgatttagaagccagtagagaggaaaagaaatagaaagattctaaacagtgtctgactcttctagagaaccagtgctcattgattattctttgtagttatttgaccaagttagagaatctcagtgaaaatgacttgaaatgggttgagtattataaagaaaccctagttattgattaggttttgataagaacgattgctcttaaaacttcttagtcttttgctcatagatgaatttgcttctgtatgtgatgtgcagggatcagctgggacttgactgtgacagcagtaactgatactggatggtctggtttcctttcttcaactgaaagtagtactaaagatgaacccaagaaaactcattttttaacacaaggaaaaaaaaacctcctggtttatttctaagtcttatctatttctgaaaaactgcttttttttttcttttttttttgagacggtgtctcactcttgttgcccaggctggagtgcaatggcgtgatctttgctcactgcaacctccgcctcccgggttaagtgattctcctgcctcagccttccgaggaattacaggtgcctgccaccatgcctggccaattttttttatttttagtagagacaggatttcatcaccatgttggccaggctggtcttgaactcccgacctcaggtgatccaactgcctcagcctcccaaaatgctgggattgtagtcgtgagccaccacacctggccctgaaaaactgcttttttaacctttgcaaaaaggcagttatccatcactgcataaggaaaagggctattagtgtacattacatttttatcatcagtttgttttgttcatgcttgtgatgctagttatctgctgagattttaggtcattgatcatggccacctggtgtgtgttttaaatgataaaagatatctctgaatgacagttgggatttcctagacactatgtaatcagaaattcaccttgaacagtgtaaaccccatctgaatttggtagattgttggtaactttcaaaagcagagacctctccccacccaccatcatctttttttttcctggtatgttgactgaattaagttggagactttgcaaagaactgggaaggagagaaatagctctccaaccattctgagtgagaaaaatagtcaaatcactctgagatacatggaattgaggtcactctctgagggttaaggatgctggcatgcacagaagtcatgtgcactgcagaagacctgcaggatgagtcttctcttttgtgttattgtgagacagaaataaatttttgacaagtacagattatttggaacaaaataatcgaaacatttagagttcgatagacttcaatgaatagcttcagtctgctctgagttttcaccctgttaggaatggttcacaatgagttctctagtttgtgaagagaaacatacttattagctgttagattttgtccagggttttttgaatcattttattattttggcagctgatttgcttgaattcaattaggggaaaaagaaagaaaaacaataactgaaaagtgactgattccagcttaatcgaaatggtagccctttttggcatgttattacagacctggagaactagttatttaattggactctaaaaataaagcaattttatcatatattatccagcattaagcagttatatactagatataaaataattatctcttaataaaatgcaagaaaaatttacatctgagttggctttcctctacatcaactatttgcgtttttgtttgtttgtttgttttgagacggagtctcacctgaccccctaggctggagtgcaatggtgcgatcttggctcactgcaacctccacctcccaggttcaagtgattttcctgcctcagcctcccgagtagctgggattacaggtggctgccactacgtccggctaattttttgtatttttagtagagacggggtttcactatgttggccaggctggtctcgaactcctgacctcgtgatccacccgcctcagcctcccaaagtgctgggataacaggcatgagacactgcacccggcaactctttgatttttatgtcacaatttcctctgccatcagaagagagtgaaaatgcaaagtaattttagggttctctttcaggtgtagtagtgatctaattcttgtccctggggaggcaacaagcgtttgaggtgtgttgcatgaacttgagtccctgaggcacagacaaacatgcaggggaatgaccagcatttatttttccctaaggggttaaaatgaatttccccaacccatgctggcttctgggaataattcttagtttgcacattcagctctagaagagggttgatccaagatagatcgctcaggatgtttgctcataattcaaagtgaaaaataaagaaatccaaatgggaggtactgagtttttccctgctaattccaagaatctgtattcctgtatatatgagacaccatattgtgcaagaagatctattaccttcttataacttagaattgattccctgagaagggatttcttcttaacatttaactttagtgaaaagaaaagtacgttattgaagctaaagttaattttttttttatattttctccctacaagtaatgttaaataaggctgtaaagaattcagaaagacacaaaggaagttgttaagaaaactggagttttctttgctaagtcagtttggcaataacatgaagcaaaatcaaagcatcctagccaagataaatctgcacaatggaatgatcagatatgaggtaatagtgtgacatgcctgtgggtatcagacattcttgtaaaaaccacagagctaaaatttggtactgcaccattaaactacagctctgccaagcaacaacaggaacactcattttaagtcattgctgcaagccaaatgtaattctcacccaaaacaattaaatcttttaacagaggcctgaatctgggcagtttgagccccgagaatcactttagtggcatggagtccgaatctcatttcagtgtgaaaatgagatggttattgttcagatcaggaggaagtgtcagctgcaaaatatagggcagtcaagtgactttagtaacttgcggtgatatttgttaagattagatttaaaaagggttagttaagaaatttgtattttttgtgagaaatgcacatatcattttataaagttcatttttagcaattagaaaaataatgctcactctagagaacttggaaaatatcataagtaagaatatatagaataaaatattatctcagtctcatatcactcagacataaactctggaagattttattgcatttgcttttggtcttttatatacacagacacacacgcaaacacaaacacacacacatacatccatacacccagctgtatctgagagtatgagtaaaatttggatcattataatgtaataatttaacacttgttttactaccccccatttctttatttattcttcaaagaaaattttaaatggtgatataatattctatttgtctggctatatcataatttattgaacatatgtttactctataaattgttttccctttactgctaataaacgtagtatttcatataaaatgtcattcacatctgtgattattttttagtatagaattttagaagtggaattttggggtccaaaagcaagaactttttgaggctcctgatatgcattgccacctgttttccagaaaggttatttacttccactggctatgtctgtaattgtctgtctcacctatttgctagcagcaagcaggatctttgattaggtattggtgtgggttgggaagaatgaaacaccctctgtggttcattgtctctaaatatcaaaaactatttattaaacaacataagtatgtgccaaacatagtttctggcactgaggatacagtaatgagcaaaagaaaccaaagccctgtcctcaatgaatttacattctactaggagaaaaaaatgcaattaatgagtaaattatgtaggatggtagaatatgataaatgttatgaagaaaaagaaattaagaaagggagatgggacagtgtaggtagggacaaaaaatgagagagtaatgcacagtgtacacatagtattaggatgttggaaaattttccacctttgaggacattactggtttcctgtaagagactagttggaaagtaagctagaaaatattgagctcctaaatccaaatttaatatttggcgaactctggaatctttgaccatagagagtaccaaatatagatttttgttagttttaatggattcttattctttggtttttaatttttatcctactttaactcattcattacaaacaacttagttctgtatcagcaacaggcagaacatgacatatctctgaaatgttgattatctattaaaggagagtatcaaaaatgtaaaaaggaggcttggcgagtggagggtgagggatgataagggaaatgagcaaagaaaaaaaaagggaaataattagaaacccagtgcagagccaatgtgagttcctggttgcagggagacctaccagtcaaggagtacttcagtgagtgtggtcccttgagcatcttttccaggccatttggagagtaacacagtggggccatttaggctacgagttggatttaaatttgcctcacttctggattaggtttttcccccgagaaataaaaccacccttcatgctgtattttgacaaaaaaacaacttccttaagggtctcttggttttttgcaagtttatcactcttcaaacagtcttttttacatagcagtgatctcttgtctcatatcttaattttggcaggattgaggaggactttaaagtaaagctaaaagactgaaacaaaagtaggttttcaaactttagatcttttcacaaattattttatgaaagatctaaattttttttaccatatttaaaagttttgaaaaccactttttctgagaagaaaaattacagacatcctctagtatattaattatactctttttgtttgtaaactagagcttattggtatacaaatccaatttcataggtaggagaataccttttaagttttttattgtgccaagtattagagatataaaacacagaagaaacatttggtattgaaaacactgcagatagctaagtatagtactttggtaaatacagtaaaatggatcagacatatattttaaaagacttaaaaatagtgatagtactgttgggagtaagtaggtagtagagtaattggaccttccctttttttttttttttaatttttgcattcactgatgctctgaattgaaaacaattgccttaaatcttatatacactttattctctttctctttgccaaataaattcacttaactcattgtctcaaaccataaacttattttaaacttaattcaaggaaagactaacagatctgtaggcccagaaaagacagtcatattagccattgtcacataaatctaaatctgtatttctagcatattttggaagtttgtcaccactaatgttgtcatactagacatgataaagcatgagagtagccaaagcatggtgggaaagtgatgctcaaattgacccagaaaggcgctgaacaaacaaacttgtctcataccacattctagttaagaggactcaagactaggaaactggtctcttatttataggccaatattattttcatcttatcaaagtttgttattcttgaataggcacagcgactatgttttttacataattattgttgccaggaaggcaatattttaagtaacaaagaaatgaacctaaaccggagagttctgggtgcataacatctctaaggtccaaataattccctattatgctgcattgttgtaagagacaatgcatatcaagtacctagaaaagggcttcatctattatagatgctaaataaatgacacatatgatggaaggcaaaagatattttcaattgtatattattgctcagagtaggatatatatatatacgtgtatatataaaggtaaccagcagagaaatgtcaaacccataaagtccttttcaatgatctcaacatacattacacacaaaaaaaatctgtaataagatatacttttgaaggtgtattttttatatcaatatgcataaatgtcataaatgtttctactaaaaagaaaacatttcatattaaatcataaagcacaactcaactgtatggtgcaaataagaatcacatctaaaacaaactagctttgaaaggttgtatataaaatgattagcataggtatgtcagataaatacaaaagataaatattgcaactatctcaacttttttaaccaaatagatgaatttgggtgaaaagcaattacaataaatgagacaaagttactttatagtagtacagataagacaagacaggctgaaaattcgattgaggtatcatcacaattatataaatttatatgtgcacataagaggtagaagaaaacaatgattagagtgatgagattattttttctctagttctacttccattaattttattgaattaataatatgatgaaattcctaaattgaaggttgatgatatatttagaaatctagaataactaggccaaaatttgtccatgatatctcattgccaaatagtagacattcgttcaataaagactttgagacacatatattttctactcacagtttaacagtctttttctgtaccaccaaaataatttcagctatatgaaacaacagaaattgttgagtctattccaattagattgtgatataataccgtcgttgctcttacgttactttttgactagcaagtagttaccttctccctccatttttacagcaatacgagaattggagacccaaccagccagacagcttcttttctgctggagaagactgtgttgtaatcatttggcatgagaatggccagtggaatgatgttccctgcaattaccatctcacctatacgtgcaagaaaggaacaggtaatgatcaccctgttaataatgtgtacttaatcttcatttcaattataaagataattcaggaatttgtgtctcaaattcattgtttgagacacaaactggatatgtccatgtatgtcatctctcgttgctctggaatatttcactcttccaaaacaattgaaaagtttgttttcaacaatgttctcaccttagatttcaggtccttaagataacaatgtgacattaacgtaggaatgctgcctggtaatatctttaagaagaacaactgccagtccaaaggccaatagacctttttatttttatttatttatttatttatttatttatttatttatttattattattattgttttttgagatggagtctcgctctgtcaccaggctggactacagtggtgtgatcttggctcacggcaacctccgcctctgggttcaagcaattctcctgcctcagcctcccaagtagctgggactacaggcgtgcaccatcacacccagctaatttttgtatttttagtagagatggggtttcaccgtgttagccaggatggtctcaatctcttgaccttgtaatctgccagcctcagcctcccaaagtgctgggattacaggcttgagccaccgctcctgaccgacttctttttttattttgatgagaacattacaaaataaaatagttgtcaacagttaaaaattaggctatattttttaaatctggattttcagcttttttaagaaataagaagacctggtaccatgtggcccatattcagatttgtcggtggtttgaagtactagagctgagaaccactgccctcccttggttggggctgcaatctccatttattgcagtcctcattgagtccttcctttgttttatgtgagtccgtgtcccaatcctgaaagacacaatcccaaatgccataatcctaaatgttgaaatctcaaaggattaaaatcccaaaaatagaattctggaaaaaaacaaattttaaagacatttatttacattttaaaatgatgatttattagagaaacatataaaaacatgacagcgtgcttcataagccactttagacaataaaataaatagacaataaaaacatacatatattttcaagcataagcactcaggtatactaatggcagttggggaaaaaccaaaatgtatgaatgcacatcactctggttgtaattgtgtgcaccagctttataacggtggtcatctgaaataccatgatgaacaacataaatcttttcacaagattgatgaagaactgagatgggttaccaccgcatattcagtcactcaaagagctgagatcttgagaaattttatctttcataaatggagatgtataaaagaacatctcttcatttattgaggaagtttcaatatttttatattgagaaccaaggaagctgaagccagtactgtaactctcagtctgagaccgaaagcctcaagacctggggggcctctggtgtgtaagtcctggaatccaaaggctagtgagcctggagttctgatgtccatggtggcagaagtctgtcccagctctcagagaaagaccagcttgccttctgtatctgttctctctgggcccctggctgattggatggtgcccatcaacaatgagggcagatcttccccacctcatccactcacgctgacacattaatcttctctagaaacactctgagacgtgccccaaataatgctctattaggtttctaggtattccttaatccagtcatgttgacacctaaaattaagtctacaggtctaccccttgcaacttggcacccatatgcatgtttttaaaccgtatttaaatttccaaataaagacaataacaaggtaatataataatttctcctgacatgatataactatcctgcatacaaccaaaaatgcactaatcccttccctagaatttggctttcaggatttcaacatttgggattttaatatttcagaattatgattttggggactttagatgttagggattttaacctctagggattttggtctttaggaatttcaaaatttgggattatgacttttgagattatgtcttttgggattataattgtcaccggtttttgccaactgcctggtctctgtaggcatttgagctttttaaccattcccttagaagtttattttatgcttataaactatggatcacaaatgccatccttatatctgtagttgaatatttacaagatataataaaataagaacatgtgtaatataaattttatgagaattgtttagttaacattaaacaagaaatattttaaaagcgaattttttaaaaggtgtgtttatcattggccaatttctaaagcacgctgtacagactttttccctaaacaaatagaaattctgtaaaatattttaacctatttgcaattaataatggtgttatcacatgaatatttaatccctagacccagacttttacccatctcaaataagagtacgaagtacacatgtaaaatataaacctatttgattaatttgtctttgaatacaaaaataataaaactaaaaaccatactctataaatattttaggaaagatttaaaccccaataatgagaaattctattagaagaaagagaacactaacatacatcaagcccgagtctcatatgaaagtcagctgttagcaataagtacgttagtctgctgttttctcacccaaggtagaatgtattctcaataccttttctacatgagaagctttcctgaccatgtcccttacttcagcacctctgcgatgagatttgtaaaactagcaaatcaagtattttctatttttctttttccggtgtaggaatctttactaaattattcgtctctatccaaatgtcatgtttgccctcttatgtctccaatggtccctggagtcatacttttcattttatgatttaaacattcttacatttcctattttattttctcctatagcagggtttctcaacagcagagctattgacatttttggtcagataattctttattttgagaggctatcctgtgcattaaagcatgtttagcataatccctgccctttgtatactacatgtcagtagcacctttacatcctttctgcattgtaaaaagcaaacatgtctctagacattgccatatgtctccagaagaggcaaactgtcccacgttgagaaccactgccctataccaaaaaagattcacaaaaacaccatgattgtttacatttcccaatggataacaagttttataaaatactggttctacctcattaaagaagaagaaggaaaaaaaccctatttttgcattttatctcccctactcgctgatttttatatttgtgcagtcaattctttactaatcagaactctggggaagtttttaaatgtttataggcttttaaaaaagatacccttttctctttttagatattttaaacctacagacctaagtagttttccttttaattaactattacatacttgtaacgatttataatatatacaaaaggcatattttttaaaagaacacctcaatgcatactgcccatgtatctgtggagtatcctgtgggttcctctcaatcctatctatttacttctcaactcccaccagagataatgacttaattcccttgcttttcccttttctattatgatatacacttgtttcactaaacaataaattatttagtgttgtacatttttgaactttaaataagtgggatcatactgtatatattctgtgctttgctcttttttttgttcagcattatgtttgtgagatttattcatgttgatgcatgtaatggcatgttctttgtttttgtttctgtattgtatttcttgtataactatacaacattttacttatcaattctcctgtcagtggacgcttgagtcatattcggtgtttttgcttttataaacaatgtttctatgagcattcttgaacttgttcttggtcaacttttgtgagtttctgtaggatatatttccaggagtgaagttgctgagtcataggatatatgtaccataaaatctactttaaaaagccaaatttttttccaaagtggtggtaccaattttcactcccaccaacaatctgtgatagatcctgttgctctacatcttctccaacatttggcactattggactttgaaatttttgccaatctggtgggtataaaatgtaatctcttgtgacttaattcacattttttgatacgtctctctgaatatcttttcatatatttatcaatcacttgaagctctgcttttgtaaagtttctgttcatatcttttggttatttttgaaaattgtttacttataatcttatacatactaatttgtaggagttctttttatattctggttactaatcccttgacaattttatatgttgcaaatatcttctcccagtttgttgcttgacttcacccttaccttatgatattttctgatgaacagaatccttaattttatttattttttttcctttatgatctaatcttttttgtgttttaagaaatctttacctactgataacctacaggtcacattggcaggcttccaaattaatccgcctgggggaggtcttatgattcatggcttacatcctgtccctgagtaaacaattttatcgtgagttcctcaaatcttatcatgaattccttaaactgttgacatactgattaatatgtagcctactgacagtggaaaaacactgatttgtttctgaatcctgaagttttactgattgttttgcacatagagcattttagcttgtattttgtaaatcgtagccaatgattataacctctgtattgtaccctccaatgaaaatcacaactcgggtctgaggagttgccctcccttctgaacttccccataaaaaccttccaacttgtagcagattctggaatatgcccaaatttgtggtgtgtcttcccaggtagatcctggcatttggcttccaataagcctttatcaaattatttctgcctcaacagccttaattttggttgacactatcctgaagtcataaagatattctatagtttctaaatgttttatagttttgcctcttatatttatatatttcaaccatctagaattgatttttaatgtcttttctgaagtatggaaccaagtttattatttctgtatgaatacacaagtgttcaaatgaaaagactacactttccctctgctctgccatgttgcctctttcaaatatcaagcatatgtgtgtaaatctctttctggtctattttcctgtccttgccaataccacactcactgaattattatagctttttaataagtcttcatatttagttttagaagaaatctatacaattatttcctcaaaattataaaaatgagttcaaatttgttagcatagcaccaaatcaagtacattgaattattgaattgatcatttttaaccttccctatcactttggtcttattccatctgatacttgctattgtctggaccctagtataggctttccatattgcaataaaagaagtgtgcaccatggaatacgatgcagccataaaaaggaatgagatcatgtcccttgcaggaacatggatggagctggaggtcatcatccttagcaaactaacacaggaacagaaaaccaaatactgcgtattttcacttataagtgagagctaaacactgagaacataaggacacaaagaggggaaaaacagacactggggcctacttgagggtggaggatgggaggagggagaagattagaaaaataactgttgggtattaggcttagtacctgggtgacaaaataatctgtaaaacaaacccctgtgacatgagtttagctatataacaagcctacacatttacccctgaacttaaaagttaaaaaaaaaagtgtgcaggtatccagattgaggtcaagcagaagtaaattagaagaaccaaacatttaaattaaaccaaaatttgtcattgcagaaggatatggttgtaaacagtcctctgaatatgtaataaatttaataattgtaaacttttaatattaggatgttgacattcaaatatttggtaccaaggtttctggtaatcattttcccactgaatatttgcaatatttcatgagagaatgtggcatgtttttgtgggcctgtggtgtaagaattcttaagcaatagaaatttccacttagggaaaattatatttaagttacatttgtattaaagatatataggtaaatataataatttaatcaaagttcatttttttaaagcatatcatttaaaataagtgtgctaatgttgaataaaactatgttaacacaaattcaattaaatcaattttccaagcttttggatttttttaaaattcaaaattacaaaatttttcattgtaaatttaaaatgatggttaagaattccaagctttaccctcatttgcctgtctcaggagttttaatttatattcattaaggtatttatgaaactcaggcatgaatattatggtctctttttcttgtctcaatacagaagacaaaaaagagcaaataaatataaatggaaccaaaagatatttgtatttaggagactttgtccatatttcaaaactatgatgttattgtagattgtaaggttttttgtttgtttgtttgtttgtttgttttgttttgttttgttttgtttttgagacacagtcttgctctgtcacgaggctggagtgcagtggtgcaatctcggctcactgcaacctccgcctcccaggttcaagtgattctcctgcctaagcctcccgagtagctgggactacaggtgcccaccaccatgcctggctaattttttgtatttttagtagaaacagggtttcaccatgttggccaggatggtcttaatctcttgatctcgtgatccaccccgcttggcctcccaaagtgctgggattacaggcataagccactgtgcctggcctgtagattgtacgtttttataaggaggtaatagtaatagttaaattcattattgtcccaagtgaaggtaattaagaaataaaaacttagggacggtgatgaagacagtatgctttttaatttggaaattttgtcagaatagtggcccttccagaggggtagatgaatgtatgaccatttagtcctatggttgttttaataaaacaaatttcaagatggcataatctgagattcaaagtaggcccagagcctcaacattacattttctttttgaaaaatttcatattcttaattctaaaagattgcctttgatgaagttgcttactttggtaccataaagaaagagagaaaaataagagactcatattagttgaaatacttagattatttggaaataacccaatttgctttcctttagtcgcttgcggccagccccctgttgtagaaaatgccaagacctttggaaagatgaaacctcgttatgaaatcaactccctgattagataccactgcaaagatggtttcattcaacgtcaccttccaactatccggtgcttaggaaatggaagatgggctatacctaaaattacctgcatgaaccgtaagtggtcctttagaaagaatggactaccgtgctataacaactactagacaccttcattttacggctgtggtatcggcagtttagggtatggagcaagtaatattgtgtgttttctttttttctttctttccttccatgtagcatctgcataccaaaggacttattctatgaaatactttaaaaattcctcatcagcaaaggacaattcaataaatacatccaaacatgatcatcgttggagccggaggtggcaggagtcgaggcgctgatccctaaaatggcgaacatgtgttttcatcatttcagccaaagtcctaacttcctgtgcctttcctatcacctcgagaagtaattatcagttggtttggatttttggaccaccgttcagtcattttgggttgccgtgctcccaaaacattttaaatgaaagtattggcattcaaaaagacagcagacaaaatgaaagaaaatgagagcagaaagtaagcatttccagcctatctaatttctttagttttctatttgcctccagtgcagtccatttcctaatgtataccagcctactgtactatttaaaatgctcaatttcagcaccgatggccatgtaaataagatgatttaatgttgattttaatcctgtatataaaataaaaagtcacaatgagtttgggcatatttaatgatgattatggagccttagaggtctttaatcattggttcggctgcttttatgtagtttaggctggaaatggtttcacttgctctttgactgtcagcaagactgaagatggcttttcctggacagctagaaaacacaaaatcttgtaggtcattgcacctatctcagccataggtgcagtttgcttctacatgatgctaaaggctgcgaatgggatcctgatggaactaaggactccaatgtcgaactcttctttgctgcattcctttttcttcacttacaagaaaggcctgaatggaggacttttctgtaaccaggaacattttttaggggtcaaagtgctaataattaactcaaccaggtctactttttaatggctttcataacactaactcataaggttaccgatcaatgcatttcatacggatatagacctagggctctggagggtgggggattgttaaaacacatgcaaaaaaaaaaaaaaaaaaaaaaaaagaaattttgtatatataaccattttaatcttttataaagttttgaatgttcatgtatgaatgctgcagctgtgaagcatacataaataaatgaagtaagccatactgatttaatttattggatgttattttccctaagacctgaaaatgaacatagtatgctagttatttttcagtgttagccttttactttcctcacacaatttggaatcatataatataggtactttgtccctgattaaataatgtgacggatagaatgcatcaagtgtttattatgaaaagagtggaaaagtatatagcttttagcaaaaggtgtttgcccattctaagaaatgagcgaatatatagaaatagtgtgggcatttcttcctgttaggtggagtgtatgtgttgacatttctccccatctcttcccactctgttttctccccattatttgaataaagtgactgctgaagatgactttgaatccttatccacttaatttaatgtttaaagaaaaacctgtaatggaaagtaagactccttccctaatttcagtttagagcaacttgaagaagagtagacaaaaaataaaatgcacatagaaaaagagaaaaagggcacaaagggattggcccaatattgattctttttttataaaacctcctttggcttagaaggaatgactctagctacaataatacacagtatgtttaagcaggttcccttggttgttgcattaaatgtaatccacctttaggtattttagagcacagaacaacactgtgttgatctagtaggtttctatttttcctttctctttacaatgcacataatactttcctgtatttatatcataacgtgtatagtgtaaaatgtgaatgactttttttgtgaatgaaaatctaaaatctttgtaactttttatatctgcttttgtttcaccaaagaaacctaaaatccttcttttactacactgtgactggtctggttatttacaactttaaatccttatgtgcaccaacatttttacattctggttccatcatggagagcaagcttctaacctggatgaaatgattttgtggcaagcaaagaaatgattatatatttacccgtaaaagttgcgataataattctgataatgttttcatctgaatactatgtattaatttcaaatatggaaactatgcaatgggaaaagtgatagctcacatcacagaaatcttcctatgaaccaaggcaagtattttacatgtaatatatcataacaagcttatgaaacaggggtcatcattactgactgataagggatcgggcatagagggctcgttatttgtccaaaatcatgcagttagtgtgtagcagaagcaggtaatccctacagcccacacagaatttccaagaaaaatgtaaaatattatatccctgattgttatgcatttaagaggttatcacccattcagatatccatccgttccttcagttttcattcattcattatttaaggatttaatgtgtgccaggcaccgtaataggctctgaagattcaccagtggatgcggtagacaggtttc

SEQ ID NO: 35 - DNA, 12413 bp, Homo sapiens
gagctgcttctccacttgagtccatcccacatcattgaacatttaattacacagaattgtgtaccatcttccttgacccccagatctttagccttctatagtaccctgtctctttttgtcgtactagtcacagttgcactttttttttttttttttttgagacagagtctcattctgtcacccaggctgcagtgcagtagcacaatctcagctcactgcaacctccgcctcccgggttcaagcaattctcctgcctcagcctcctaagtagctgggattacatgcgcgcaccaccacgccaggctaatttttgtatttttagtagagacgaggtttcaccatgttgtcaggctggtctagaactcctgaccttgtgatcagcccacttcagcctcccaaagtactgggattacaggcatgagccactgcacccggccatagttgctattttatttgtgtgattgattaccgtatgacgcttttattgaagtgcagtgaaggcaggaaacatgaccggtttttacaatattttcaacacttatcaccataggtggtacatagtagggccttaataaatatttgtaaaatgaacaaagttaatgagtgtttatgtttgtagttttaattgctctgaagtaaatatctgattttccaatttccaccagagtgctctgcacatagtaggtctaattatttttccctctttactaatcacccatgccttgtaagaattcagttagttgactttttgtactttataagcgtgatgattgggtgttcccgtgtgagatgcgccaccctcgaaccttgttacgacgtcggcacattgcgcgtctgacatgaagaaaaaaaaaattcagttagtccaccaggcacagtggctaaggcctgtaatccctgcactttgagaggccaaggcaggaggatcacttgaacccaggagttcgagaccagcctaggcaacatagcgagactccgtttcaaacaacaaataaaaataattagtcgggcatggtggtgcgcgcctacagtaccaactactcgggaggctgaggcgagacgatcgcttgagccagggaggtcaaggctgcagtgagccaagctcgcgccactgcactccagcccgggcgacagagtgagaccctgtctcaaaaaaaaaaaaaacaccaaaccttagaggggcgaaaaaaaattttatagtggaaatacagtaacgagttggcctagcctcgcctccgttacaacggcctacggtgctggaggatccttctgcgcacgcgcacagcctccggccggctatttccgcgagcgcgttccatcctctaccgagcgcgcgcgaagactacggaggtcgactcgggagcgcgcacgcagctccgccccgcgtccgacccgcggatcccgcggcgtccggcccgggtggtctggatcgcggagggaatgccccggagggcggagaactgggacgaggccgaggtaggcgcggaggaggcaggcgtcgaagagtacggccctgaagaagacggcggggaggagtcgggcgccgaggagtccggcccggaagagtccggcccggaggaactgggcgccgaggaggagatggaggccgggcggccgcggcccgtgctgcgctcggtgaactcgcgcgagccctcccaggtcatcttctgcaatcgcagtccgcgcgtcgtgctgcccgtatggctcaacttcgacggcgagccgcagccctacccaacgctgccgcctggcacgggccgccgcatccacagctaccgaggtacgggcccggcgcttaggcccgacccagcagggacgatagcacggtctgaagcccctctaccgccccggggtccattttgcagacggggaactgaggccccttgaggcaggacacatccagggtgacgctgctcgtaagcgtcagagcattcttttttttttttttttttttctgagacggagtctcgctctgtcgcccaggctggagtgcagtggcgcgatctcgactcactgcagcctccgcctcccgggttcaagcgattctcctgcctcagcctcctgagtagctgggattacaggcgtgcgccaccgcgcccggctgatttttatatttttagtagagacggggtttcaccatgttggtcaggctggtctcgaactgctgacctcgtgatccgcccgcctcggcctcccaaagtgctgggcttatgggcatgagcctccgcgcccggcccagagcattctttataaggccgaatagtttgcatttgaaggtggctccccccagtcccccaccccacgtgtattttcccctcaaagaaaagctgcatccttaacaccccatctgttcagtcctcatgactccagtgggccagttctgcgtagtccctgccctcgtggagaacacattcctcctggggagactgacagatgcaaagacaggaacaagccagggtcatgttggcgccggaagagccgaccgtgtgtggcgtgggaaattgacttacctgcctgctgggagatggaggggttgcggttgtgtggtttcagttaaggagcacttcccggagaaggaagagagcaggatggagtaggaactagccaaccctaggtaagaggttctagacatgcgtgcgttgagacctggagtcttgggagaggatgcttaaaaggtgattttacccctaggaatatgggggcactgaaatttttttttttttttgagacgggagtcttgctctgcaagctggagtgcagtggcccacgctagaatgcagtggcgcgattgcggctcattgcaacatctgccacctggggtcaagtggttctcttgcctcagcctcccgaggagcggggattacaggcgtgcgccaccactcctggctaattttttttttagtagagacgggggtttcgtcattttggccaggctggtctcgaactcctgacctcagatgatccacccgccttggcctcccaaagtgctgagattacaggtgtaagccactgcgcccagccctttgaaagtttttcagtatttatgtatatatatttttgagttggagtctggatctgtcgccagactggagtgctgttgcacaatcttggctcactgcaatctccgactccctggttcaagcgattctcctgcctcagcctcccaagtaactgggattacaggcacgcactaccattcccagctaattttttgtattcttagtagagacagggtttcaccatgttggccaggatggtctccatctcctgcgctcgtgatctgcctgcttcggcctcccaaagtgctgggattacaggcgtgctgggatttcggccacaacgtccgaccgaaagtttttaagcagggacatgacattgtcagatttatatactgaaaagctcacccaggttgccaagtggtttggaggggaaagactgctgtcgaggaagcagttaggtagttgtgaaaacccaggtgaggaataactaggccttacctaaggtgcaggcagtaatcttgccatggcctttaagcagagaagtagtcctagtgtcacttaatctttacaaaggatttttgcaaggatcccgatctttcttccttgagggtggtgtacttaatacacttttacaccagacttctaatgttagatgaagaacacagtatttccagggatcaacatttctgtaggctcctattttatataggaaattgtatgaattttgtattttactccaaaatttttctgtgcccgatttaatataaaaatttactgagcctgggtgcagtggctcatgcctgtgatctcagcactttgggaggctgaggcaggaggatttcttgagcccaggagctggagaccagcctgtgcaacatagtgagaccctgtctgtatttaaaaaaaaaaaaaattcttgaaaaattagcagggcacattcctgcctttagtcccagctacttgggaagctgaggcaggaagatcacccgaacccaggagttggaggctacagtgaactatgatggtgcctctgaatagttgctgtactctagtctggtaacacagcaagaccctgtctctctatcttgtcttttttttttttttttttgagacaggatgtcctgctgttgcctgggctggagtgtggaggctggagtttggtggcatgatcacggctcattgcacccttaacctgggctcaagcagtcctcccagagcttcagcttcccaaagtagctgggactataggcatgctccactatgtctggctaatttctttttttatttttatttttagtagagatgaggtcttgctatgttgcccaggctgagacctcatctcttttttatttttttaaaattttttattatactttaagttctagggtacatgtgcacaacgtgcaggtttgttacatatgtatacatgtgccatgttggtgtgctgcacccatagagacctcgtcttaaaaaaagaaaataacattacttttgaaggtacttaatgcactgaattgtacatttaaaaatggttaaaatggtaaatgtttgaggcaggtagatccacctgaggtcaggagttcaagaccagcctgaccaatatggtggaaccctgtctctgctaaaaatacaaaagttagctgcatgtggtggcatgcgcctgtttagtcccagctactcgggaggctgaggcaggagaattgcttgaacctgggaggcggaggtggcagtgagccaagatcacaccactacactccagcctgggcaacagagcaagactccatctctaaataataaataaaatggtaacttttatgtatattttaccaaaatttaaaaaattacaagtttacatttcttaaaatttcccatcaaatctgtaagtaaatttatgccccgaggaacaagtgctatatttattctaagacaacctcctccttccttaaacagaatcttagggctggaggattgcttcctgccctcttttgtttgtgatgtatgcattttgaaaattctgggccaggcgcagtggctcactcctgtaatcccagcactttgggaggccgaggcgggcggatcataagatcaggagattgagaccatcctggctaatacggtgaaaccctgtctctactgaaaataacaaaaaattagccgggcgtggtggcgggcacctgtggtcccagctatttgggaggctgtggcaggagaatggcataaacctgggaggcggagcttgcagtgagccgagatcgtgccactgcactccagcctgggcgacagagcaagactgcatctcaaaaaaaaaaaaaagaaaaagaaaagaaaattctggtataatttacatacagtaaaatgcacagatcttagggtttgatgagttttctctcgacatgtttttgcacttccttgtttttgagaagcactgatttgagaagtcagtggctttttctctttagtttgcagggtttgctgtgatttgtaatcacgtacttgacctaggcttcccttttccaccatggtagcagaaagggcatgggattgagagctttaagtacgcgctctttgcttactgtcttataccttgagcatgtcacttctctcagacttgttttctcatctgtaaatggatctgttgtgaggactgactgagataatgttactagaagggctttgtataatatttaagcagagtgagaggtaagctttttgtgtaggtcaggggaaatggagaaaataggtgccctgactcagaccagtctggctctttttttttttttttttggagacggagtcttgctctgtcacccaggctggagtgcagtggcgcgatctcggctcacggcaagctccacctcctgggttcacaccattctcctgcctcagcctcccgagtagctgggactacaggcgctcgccaccacacctggctaatttttttgtatttttagtagagacgaggtttcaccacgttagccaggacggtcttgatctcctgacctcatgatccgcctgcctcggcctcccaaagtgctgggattacaggtgtgggccaccgtgcccagccaccggtgtggctctttaacaacctttgcttgtcccgataggtcacctttggctcttcagagatgcagggacacacgatgggcttctggttaaccaaactgaattatttgtgccatctctcaatgttgacggacagcctatttttgccaatatcacactgccaggtactgacgttttactttttaaaaagataaggttgttgtggtaagtacaggatagaccacttgaaaaattaagcccagttctcaatttttgcctgatgtcaggcacgttatccaatctttttgtatcctattctctaccataaataaaatggaagtgatgtatttgtacgttatgtgttaaaggtgttatggtgtctcaaaagcactttgggctcttaagagacaagcgaaattaaagtatcatatcataggttagttttgtagaattgtagaattacgaatgccttttgtttccctggccaaattgtgccctggagttccaggagaacaatgtgtagagcatgagatattttggcttatttgttgctgacttctaattttttttatttttttgagacagaatctcgctgtgttagctaggctggagtgcagtggcgcaatctcggctcactgcaacctccgcctactgggttccagtgattctcttgtctcagcctcccgagtagctgggactacaggcgtgtgccacccactctgataattttttgtatttttagtagagacggggtttcaccgtgttagccaggatggtctccatctcctgacctcatgatctgcccgcctacgcctcccaaagtgctgggattacaggcatcagccacagcacctggcctatgtattttcaatttaacacaatcaagctcacagtgccaatcagaggtgttttttttttttttatttttatttttagagagtctcacagtgtcatccaggctggagtgcagtggtgcgatttcagctcactgcaacctctgcatcctgggttcaagtgattctcctgcctcagcctcctgggtagctggggttataggtgcctgtcaccacacctggctaatttttgtatttttagtagagatgaggtttcaccatgttggccaggctgatcttgaactcctgacctcaggtgatctgcccacctcagcctcccaaagtgctgggattacaggcgtgagccactgcgtccagcctgtttttttttttttttaaatcattgaagattggtataatacttcactatttgtttgaagctcaaatgattttatcagggtaaaccctaataaactgatgttcctgtgggtaaaaaaaacctcactaaagaccagcagtgtgtggtggctcctgcctgtaatcatgcctgtaattccagcacttagggaggctatggcgggagggtcgcttgagaccaggagttcttgaccagcctggacaacaaagtgagaccccagctccacaaaaaaatttttttttaattacctgggcatcttagcatatgcctgtggtcacagctatttgggaggcttaggtgggaggatcccttgagcccaggagtttgaggctgcagtgagccatgatcataccactgcactccagcccaggtgacagagtgagatcctgtctcaaaaaaagaaaaaaaaaactcaaaaaccccccaaatacatgggtttcataggattcaaactactatgtgtgtatagatcctgttttaaggaagtagatatataaaaatgagcattgctaagttaaatttggtaaatttgccttatagaataccctcgagtacgtttccagtgagtgtaaaataggaattgggatacccaattcagttgtactagattttctttttttttttttttttgagacggagtctcgctctgtcgcccaggctggagtgcagtggcgggatctcggctcactgcaagctccgcctcccgggttcacgccattctcctgcctcagcctcccaagtagctgggactacaggcgcccgccactacgcccggctaattttttgtatttttagtagagacggggtttcaccgttttagccgggatggtctcgatctcctgacctcgtgatccgcccgcctcggcctcccaaagtgctgggattacaggcgtgagccaccgcgcccggcctagattttctaagtacacattgttttggttatgtgttttgtgactaccaccccaaaactaataaccaccttttttttttttttgagacagagtctcactgtgtcacccaggctggagtgcagtggcgtgtgatcttggctcactgcaacctctgcctctcgggttcaagcgattctcctgcttcagcagctgggactacaggtgtgcaccaccaagcctggctaattttttgcattttagtggagacgggggtttcaccatgttgaccaggctgatcttgaactcttgagctcaggcagtctgcctgcctcagcctcctaaagtgctaggattacaggcgtgagccactgcgcccagcccaccattttatttgttcataattctgtagtccaggctgggctcagctaggcagttactctgctggtggtagtcgttggtgtggctgccttttgctggcagctgggggctgggcctgtccctcttttttttttttctcttttcttttttcttttttttcaagatagggtctcactctgtcacccaggttggagtgcagtggcatgatcttagctcactgcaacctctgcctccagggctcaagtgatcctcccacctcagcctccccagtcgctgggaccacaggcatgtgccaccatgcctggctaattttttgtgtattttgtagagacggggtttcgccatgttgccaggctggtctcgaactcctgagctcaggcgatctactgacgttggcctcccaaagtgttgggatcacaggcatgaaccaccatgcctggccagggcctgttcctctttatgtggtctctctagcagggtagctcagggctttcaaaagtataaaagcagaagtcagcaggcctttttaaggcttcggcctagaattgccagtgtcgcttcatccacattcagttagttaaagcaatcacaagcccagcccatttcaaggtgaaattactacagaggcatgaacaccatgaggtgtccatagggggccatcagcataacacactgccacatacatgcactcactttttttctttaacctaaagtgagatccatcagtagtacaggtagttgttggcaaagcctcttgttcgttccttgtactgagaccctagtctgccactgaggatttggtttttgcccttccagtgtatactctgaaagagcgatgcctccaggttgtccggagcctagtcaagcctgagaattacaggagactggacatcgtcaggtcgctctacgaagatctggaagaccacccaaatgtgcagaaagacctggagcggctgacacaggagcgcattgcacatcaacggatgggagattgaagatttctgttgaaacttacactgtttcatctcagcttttgatggtactgatgagtcttgatctagatacaggactggttccttccttagtttcaaagtgtctcattctcagagtaaaataggcaccattgcttaaaagaaagttaactgacttcactaggcattgtgatgtttaggggcaaacatcacaaaatgtaatttaatgcctgcccattagagaagtatttatcaggagaaggtggtggcatttttgcttcctagtaagtcaggacagcttgtatgtaaggaggtttgtataagtaattcagtgggaattgcagcatatcgtttaattttaagaaggcattggcatctgcttttaatggatgtataatacatccattctacatccgtagcggttggtgacttgtctgcctcctgctttgggaagactgaggcatccgtgaggcagggacaagtctttctcctctttgagaccccagtgcctgcacatcatgagccttcagtcagggtttgtcagaggaacaaaccaggggacactttgttagaaagtgcttagaggttctgcctctatttttgttggggggtgggagaggggaccttaaaatgtgtacagtgaacaaatgtcttaaagggaatcatttttgtaggaagcattttttataattttctaagtcgtgcactttctcggtccactcttgttgaagtgctgttttattactgtttctaaactaggattgacattctacagttgtgataatagcatttttgtaacttgccatccgcacagaaaatacgagaaaatctgcatgtttgattatagtattaatggacaaataagtttttgctaaatgtgagtatttctgttcctttttgtaaatatgtgacattcctgattgatttgggtttttttgttgttgttgttttgttttgttttgtttttttgagatggagtctcactcttgtcacccaggctggagtgcagtggcgccatctcggctcactgcaacctctgcctcctgggttcacgtaatcctcctgagtagctgggattacaggcgcctgccaccacgctggccaatttttgtacttttagtagagacagtgtttcgtcatgttggccaggctggtttcaaactcctgacctcaggtgatccgcccacctcagcctcccaaaatggtgggattacaggtgtgtgggccaccgtgcctggctgattcagcattttttatcaggcaggaccaggtggcacttccacctccagcctctggtcctaccaatggattcatggagtagcctggactgtttcatagttttctaaatgtacaaattcttataggctagacttagattcattaactcaaattcaatgcttctatcagactcagttttttgtaactaatagatttttttttccacttttgttctactccttccctaatagctttttaaaaaaatctccccagtagagaaacatttggaaaagacagaaaactaaaaaggaagaaaaaagatccctattagatacacttcttaaatacaatcacattaacattttgagctatttccttccagcctttttagggcagattttggttggtttttacatagttgagattgtactgttcatacagttttataccctttttcatttaactttataacttaaatattgctctatgttagtataagcttttcacaaacattagtatagtctcccttttataattaatgtttgtgggtatttcttggcatgcatctttaattccttatcctagcctttgggcacaattcctgtgctcaaaaatgagagtgacggctggcatggtggctcccgcctgtaatcccagtactttggaaagccaaggtaagaggattgcttgagcccagaacttcaagatgagcctgggctcatagtgagaacccatctatacaaaaaatttttaaaaattagcatggcggcacacatctgtaatcctagctacttggcaggctgaggtgagaagatcattggagtttaggaattggaggctgcagtgagccatgagtatgccactgcactccagcctgggggacagagcaagaccctgcctcaaaaaaaaaaaaaaaaaaaaaatcaggccgggcatggtggctcacgcctgtaatcccagcactttgggaggtcgaggtgggcagatcacctgaggtcaggagttcgagaccagcctggccaacatggtaaaaccccatttctactaaaaaatacaagaattagctgggtgtggtggcgcatgcctgtaatcctagctactcaggaggctgaggcaggagaatcacttgaacccaggaggcgaagattgcagtgagctgatatcgcaccattgtactccagcctgtgtgacagagcaatactcttgtctcaaaaaaaaaaaaaaattcaaatcagagtgaagtgaatgagacactccagttttccttctactccgaatttcaactgattttagctcctcctttcaacattcaacaaatagtctttttttttttttttttttttttttttttgagatggagtctcactctgttgcccaggctggagtgcagtggtgcgatctctgctcactacaagctctgcctcccgagttcaagtgattctcctggctcaccctcctgagtagctgggattacaggcgcctgccaccatgcctggctaattttgtgtttttagtggagacggggtttcaccatgttgtccaggatggtcttgatctcctgaccttgtgatccacccacctcagcctcccaaagtgctgggattacaggtgtgagccaccgcgtccagccagctttattattttttttaagctgtctttgt

SEQ ID NO: 36 - DNA, 72538 bp, Homo sapiens
aaaataaaaatgcagaactaacgcagcgaagggaaggaaagtgtggctgggaatgtccagtcagctggaggggcttggagctcggcgttggctgggagcatttttattgctgccgggaggaggaaggggaagcgggggaagcgggggaggcgggggggcagcgtgttgtaaaatcagtttgaagtaaacaaaaagttatgttttccgaggggccagcagcgcggagagcaggcctagcccgctgccgggaaggcgggtctgtccagtagagaccggaacgccgcgcaggctcagcaaagggctaaggctggagccggggaagctgcctctaggttagcgaagggtaaaggaagtcagacactgacgcgagtggcctcccgatcccgcagtcgagtggagaaccgagtcccgacctaaggtcgaatcatcaggcgtccccgtcacccaacaacccactcaggcacttccggtaagaaatctagtgcccttggctcggaacctgcgtcgtagtgcgcaagcgccccgggcctggagacggccgcggatgccgagggagggggcgtgtgagccgaagaggaaagcgtcctctgcgcctgcgctctctgcgctgcccggtggggcggggaaagaagccctgagccgggatctggcactcccaggactcccggccggggtagctcttcactcctcagcgcgacgtcgtgtcgagttcccaaaaagctccgcaggggctgtagggaggtaagagccccccgtgaccggtcgtctcggcctcccctcagccctgctgttcccacaggggggcggggtgaccgctggacccgccgacctgggcgctgggtctggccctcttcctctggggacagagcctgggccccgaccgattccttttccgagcccccggagctggccggggaaccctggccctccaatctgatgtcccctcctggagcctgaagggccagaccggactggaccgggagggcaatcacggcggctgtttgcccggttccccgctcccgggccgccggagtgttcggcgctcctgggggagagaccccagcggacggagggagaagcgccctggcgccgccgtcccgcctggggaggggctgcgactgcggaggggactgtggttcttcaggagtggcagaggctcggtccccgcagaggagtctcatcgccgccggtgctctcgcactgtccattcccgcacccatgcattttctcttggttagagaccagaaggatgcagtggccgtctttcccgctgcctttcctttggtacttttgagaactccaaaagaggaccttatttttaactcttatttgtactatcgtgattgcaaatattatgttccagactaaggatgttctttcttattagtttgacttgtatgaaaaccagtccatacatttgatattaagttaatcttttcaattcaaaaaataggcactttgttgattcaatcagattcctccatttattcacttgagcttgtcgtctcttgagttggcgggagtttaatggtttaatccagtagaactatatataatttttcgcctaatttcttcctttttttcctctcctggatattaaaccgcatgcttagtggcaaaaattgaaaaaatagaataaagaataaggaaaaatgatcaatcataattccaccatgtaatagtaatcaattacttataatattttgacttttttcctttgagtctttttttcccctgtgcattttcttgagatgagattttatatcgttggattgtctgctttccttgatttaaattacgttgtaagcatttccccatgtttttaaaaagcttcataaaaatgacttcttgattatacatgagcaaagtatcttttgaaacagttatattacagataaagccaaatccgcattaattatcctcaatcataatgttacatgatagaatagtgctacagttcatttaacattatgattggggataattacgcttaaaaattattgaggaccaatagagtttttggttcctaatgctgcagtatatttaccattttggaaattaaaactcagaaaattgaaaatgttttattcatttaaaaatcacagactcatgtattaaataattttttagtgaaaagtaaccattttctaaaacaaaacttagaagaggagcgtggcattgtttcaaatttttgcgaatcactttaatgtctggcattatagaagacagctggattttcatgtttgcttctgttcagtctgttgtgctatctggtttaggttgaagcatatgaagaaaacaccagccttgaacagatacgtagcaggaaaagcgaggatcttacaagcctgctgaaaggctcctggggacatccaggggtcctgagaccacagtttgagaaagctgatttaaccatttttggattggtgggctgttaggttgtttaaaattttacactgttacaacccttgcaacagtgaaagttctttgtgatgttttctggtgtatgcgtgctagtgttttttctgtaagtagaattgctaggtcatagagttttgcttttttttaagtttgttaaacacattacttttgatgcctgtataatttgcttttgtgcactaatgttggtgtttagattgtttcaactaatgatttggtgaaatatctttgcatgtttttagttgttttgaattattttctttttgagggggctggggggagtccagtaaaaaccagacaactgccagatacattttaagagagctttaacacatggattcttttctaaaatttctaaaaagataattgttagatcaaatattaggaatctttctcaggctattggtacatattgtcacattgttttcatgggagatagtaccagtttgtttcctgtcagcagtgtctgacatgctttaaaaaaaaaaatcacacccttaccaacatcgagtacttttattattttaaaaaattgtttcaatttagcaggcaataaatggtatatgttctaattctcattactttgatagtgcactgaataattttcataatcttactagttgtctgttgatgttatttgctcgtttatagtccagtatccaagtgtttttctaacacatttttatcttcttaaatatattgtaaggaaacgtgctgtactttgtttgtttgttttttaagacagagtctcgctctttcgccaggctggagtgcagtggcgtgatctcggctcactgtaacctctgcctcccgggttcaagggattctcctgcctcagcctcctgagtagctgggactacaggcacgcgcccccatgcccagctaatttttgtagtttagtagagacagggtttcaccatgttggccaggatggtctcgatctcctgaccttgtgatccgcctgcctcggcctcccaaagtgctgggattgcaggtacgagccacctcacccgaccttaggaaacgtgctgtacttttttttaaaggaaaacaacaaaattatgttttctcggtttacaagagcacatgccttttttttttaaatttattttatttttattgatttagttttttgagatggagtctcgctgtgtcgccaggctggagtgcagtggcaccatctcggctcactgcaacctccgcctcctggggttcaagcgattctcctgctttagcctcccaagtagctggggctacaggcacgtgccaccacgcccagctaatttttttttttttttttttttgtatttttagtagagacagggtttcaccatgttggccaggatgatctcgatctcttgaccttgtgatctgcccacctcagcctcccaaagtgctgggattacaggcatgagccaccacgctggccaagtatatgcttataaaaaaaaagtaaaatagtatgaagacatatcatgtagctctgaaaggcttacataatcccattcctagatttatagtattactaacatcattaatgtttgttccttcatatttttttactatgcatttgttaattttttttacaacttatttgtaaaaataggtttgcactatgcataaagttttgtgatttgattttctttcatttaacattatatattggatatttttctactgaagtacatataactgggcaaagttttatcctgagtggttttaggaacatgagttgtgatctttagttatctgatggcaggctcttgtcctcttctaaatatattctcttcctaggtgatctcatccattaacagctgtgtgttgccagttcccaaatctttatctatctcagacttctctcctgcattccagattcttatattcagctgccttttggatatctctcccaggatgttctcaaggtacttcaaacagtccaaacgtgaactcatgttttcccttaatcctgctcctctttgtattgcctgtcatggtcagtggcaccaccatctaccctagccactcatggtggaaacctggcactaatccagctttctcccttgctttcggtctccaaaacttctcattattttgccacttttatttcattttattatttttatttgagacaggatctcactctgttgtccaggctggtctcaaattcctgggctcaagctaatcctcccacctcaggctctggagtagctgagaccacaggcgggcatcaccatgcctggctcattttagccacctttatatgtatttcctttttttctccactgcattatctcagctcaggccttcatctcttaccttaaccattttaggtgtctccttactgttggttttgttggttttctggttaatcttccatgttactgccaatttttgtaatcatgaagagatttttaaaaaccattttattgtaaatattacgaagattttttcttaaatttaaaaatatataaatagccaagtgagtaaaaatactacctaaaataagttatatgtatacataaataaacctattttaaaagggagtatatcttatatttcttttatgtcttatactgaatatggtagattattggcacaaaaagtacatactgattgattgaaatgggaaatatacacagcttaatgagatttcatgttaaaacatttcagtataccgtatttacattgtcatatcataccttttacaaattatattatctttttttatatctttcttggcacctgaaattacataatgcttagtagagcattgctatatagataggaatgttttgtaaatatatgttatttaatgaattccataatttatttctaaaaaattctctggcttttgctaataagaaactatttctagacctttcagtttctgtgcttaatttgttaaatacatcctgtattcagagttccgttactactactttttactattatgtttattttaaatttaatgtttatatttatcgaagggatacctgtacataaacagtcaaatagtacttcaaggattataatgaaaaactgtctgggtgtggtggctcacgcctgtaatcccagcactttgggaggctgaggcaagaggatcacatcagcccaggagtttgagaccattctgggcaacatagtgagaccttgtctccacaaaaaataaacaaaattagctgggttgtggggcacacacctgttgttccatttacttggaaggctgaggtgggaggatcgcttgagcccagcacgtggaggctatagtgagctaatatcgtgccactgcagtccaacttgcgcaacagagtgagaccctgtctcaaaaaagaagagagggctgggtgcggtggctcatgcctgtaatcccagcactttgggaggctgaggcaggaggatcacctgaggtcgggagttcgagaccagcctgaccaatatggagaaaccccatctctactaaaaatacaaaattagccaggcatggtggcgcatgcctgtaatcccagctacttgggaggctgaggcaggagaatcgcttgaacctgggaggcggaggttgcagtgagctgagatcgcgatattgcactccagcttgggcaacaagatcaaaacttcatctcaaaaaaaaaaaaaagaaaaaaaaaagagaaaaacaacaatcttctgccccagtccttctcacccctgaatcccactctccagaagcagtctttctcaatcagtgctttctgtctgaatcactgaacaagaaaaatgatttgagcaactattttcttaattctcccaaagagggtaggtagctaataatatgatggatgcataggagagaagttagtttattacataaaatggaagccttagggcattaaagattaattctctcgccgaaccttaattgagaaaggctgctccagagtcagtgacttcaattccttatcacttccagttttttaaaatgacatatttagatatatggcgatatcccctccccattcccatcctaatgcgatttgaagtatagtttactcatttcctattacagaagatgggagtttaggttttttgtaccaactcctacctttaaacactgcatttcacttcccctctcccctctatattcccaaattagttacatgttaacttttagttatttggtgtttacctcattttaactatgtaaatattgtatgtagctgaacaaggtaagtgtgaggttatttcctttcttgtataatttttgtttttcctagttaatatcttaattcttttgtacatgtaccttttatatttctttataaataaatgttttatatctttttaatgtgtcttttgtattctttatttgatctattaatctcttgaaccagatacatcagtctcctcttagtagattcaaacacatctgataatctgttttgcgacatctttcctgcctccatcttgatgggttgctctctaggcctgttgcacaactctcttcctggactgcccttttacagtcatctgtgaattgcatttgtctcttctgtgtgggtagcctctttttcttggatttcaggttttcctttttcttggtgtctcccttatattggcagagtatgtttttgagtagcttcctgagagagacagaatgggatgcacatattttgggttcttgcatggtcaaccatttttttatttaaccctcacatttatgataaccaatcctttgattgtgacctgttatatctctttggaagcgtttatatttattcagcaagtatgtattgagcacattttatgtgccgggcactggtcaagacattttgaatatataggtgaacaaaaatacaagattcatgtccttatagagcttaaattcagggagggaggagttgttcaacagcaaatataataaataaattatacaaaacattgggagtttgtaaagtaaataactgctttagaaaagagaaaaaagagcaggctggggtgggaagttcaggaatgttggggaaaggagaggtaggggatgcagactgtagtattaaatggggtgatcctcccttcaaccattcaggtgttctgaaatttcacaatgatgttggttggtaagagtttttcattcatgtgttgggccccaaatgggccctttccatttggagaccatatccgtggtttatttgacagtttcttctttccctcccttccttctttctggacttcttttattagaatattaaacctcattagattgattctctaatttctaatattttctctcctgttttctatccctttctgttctgttttctaggatattttctcaactttattttataacaccttgattgcatttttaaaaataaacattttattttggaacagttttagatttacagaattattgcagacagtatagagttcctatatactccacacccagtttattattaacatcttagattaatatggtacatttgttataattagtgaactagtattgatactttattaactaaaggctatactttattcgcatttcctcatttttcctctaatatgctttttctgttccaggatcccatccaggataccacattacattgagtagtcctgtctccttaggcacctcttgattgtgatagttctcagacattccttgtttttgatgctcttgaaagttttgagggttactgctcaggtgttttgtagaatgtcagttgagatttgtctcatgtttttctcgttattatattggggtaatgtgtttcggagagaaagacaacagagataaagtacaattttcatcaatacatactgtcagtgtgacttgccacttttcttttttttttgagatggagtctccctctatcacccaggctggagtgcagtggtgcgatctcagctcactgcaacctctgcctaccgggttcaagcgattctcctgcctcagcctcttgagtagctgggattacaggcacgtgccaccacacccggctaatttttgtatttttagtagagacggggtttcgccatgttgattaggctggtctccaactcttgaccttgtgatctgcccgcctcagcctcccaaagtgctgggattacaggcgagagccaccacgcccggccaacttgccacttttaatgttaaccttgatcacttgacttgaggtagtgtttgttaggtttcttcactttgaagttagtattttctttttttctccctttctgtattctttactagaaagtcactgtgcgctgcacacttaaggaatggggagttctacttccttgagagcaaagagtctaaataaattatttggattttttttttatttttttgcgtgggagatttgtcttttccccaattatttattcaatcatttacttacgtcagtatgaatacatagattttttttttttttttttttttttttgagacaaagtctcgctctgttgcccaggctggagtgcagtggcgtgatctcggctcactgcaacctccgcctcctgggttcaagcgattctcctgcctcagcctcacaagtagctgggattataggcacgcagcaccatgcccggctaatttttgtgtttttagtagagatggggtttcaccatgttggccaggatggtctcgatctcttgacctcaggtgattgcctgcctcggcctcccaaagtgctgggattacaggcgagagacactgcgcccagccgattttttttttttttttaatgtgttgggttatacttcagtactgctcttttattttgtcccagctttggcctttgggagttctttcacttgggtcttgtatctctttgacatactcccattgttgtatgtgtgtacatcaacttttactttctggcattacaagatgctctgtgctcattttgtttatttcctgccctagttttagaaacagccatttttccaaggagacttggttccttttgttggagaattttattagaaaccaagatctgggtgctaagtatgttcgttgcccctgggatgttactgcttctaggccctctaagctgacaaacacaaggagatatgttagtatatgtgtttatactaacctgtattacacatatatctgtaaatatttctatgtgtgaccatcggtatccatattaagctgaacatgaatttatattgatgtcttcagttcaaatccattaccatatagattattttatcttcctcccctgccataacctcctccttcaacagggagaaacttggcttccacgatcagtcgtccatttacttacttgttcaatttcagtatacagatatagtgatttcagaattgttaacctgtaccaccatggaaaacaactttatcaactagggtagagtgcctgtcttttctttctttagtcttacatattccactcatttccaaaggtcagcaccttattcctacgtcccctgtgatgaggttgtttcatacatttggaatatagttagactttttgtcgcagtctgcatgccaatctaggatcccccattctcctaaataattttttgaaaatttgcatgttgaggtttattctttatgctttgaagttatatggttattaacgtgattatcttatattcaccattactaccctaaaaagtctgtgcttcacatatccaactctcccccactttaaaccactggctatcattggtgttttactgtctctgtagttttaccttttctagaatgttacataattagaatcatgtagtatgtaaattctttcacttggcagtatacagtaagattcactcgtgtttttgtggcttgatagcttctttctttatatcactgaataatattccattggatagatgtgtgatggtttgtttatccaaatacctaatgaagtacatcttgattgcttccagtttttggcagttatgaataaacctgtttatatgcattcacatccaagttattgtgtgaatgtaaattttcaaatcagatgagtaaatacctagtagcacatgattgctggattatatggtagtagtaagttttgtaagagaccgccaaatagtcttccaaagcagctataccattttgcattctcactggcaataataagattttctcttgtttggcattgtcacagtgacattctagtagatgtgaagtggatatctcattgttctaatctgcagttccctaaagacaaatgatgttcagcatttttcatattcttattttccatccttatatcttctttggtaagatgtccattcagtacttttgccaattttaaaattggattattttctttcttcttttccttttctttcactttttgccttttctctcctttcctttcctttcccctcttctctcctctttctcctctcctctctcctttctcttctcctctcctctttcctttcccctcctctttgctctttcttttcccttcccctcccctcccctgccctcccctcccctccccctcctttcttttcgacagggtctgactctgttgcctaggctggagtgcagtagcacgctcatacctcactgtaaccttcaactcctgggctcaagctatcctcccatctgagcctctcaagtagctagaactataggtatgcacccccacacctaactaatttttaatttttttcttagagatgaggtttctctatgttgcccaggctggtcttgaactcctggcctcaagtgaacttcccacctcagcttcttaaagtgctgggattacaggtgtgagccactgtgcctggccttggattatcttcttgtcaaattttaagagttctttatagagttttagatacaagtccttaatcagatatgtgttttgcagatattccagtctatggcttgtcttcttattctcttaacagtatcttttgcagagtgcaagttttacattttaataagatcaaacttaccattttttctttcgtggatcatggtactggtattgtatttaaaaactcctcaccaaacccaaggttatgtagattttctcctgtgttttcctgaagaaattttacaattttgaatgttaagtttaggttacccactttgaatatgtttttatataaggtgtaatgtctgtgtctaggttcatatttttcatagagatgtccagttttttcagcacctgttattgaaaagactgtccattctccattgaattgcctttgctcctttgtcaaagatcggtgtgggttttttttttttggggggtctttttttttttatgcagggtctcactctgttgcccaggctacagtgcagtggtgtaatcatggctctctgcagcctcagcctccctggtttcagctgattctcccacctcagcctcccaagtagctgggactacaggcgcatggcaccatgtccagcttattttttatgttttgtggagacagagtttctccatgttgccctggccggtcttgaactcctgggctccagcattctgcctgcctctgcctcccaagtgctgggattataggcgtgagccaaccatgcctggccatttctggggtctattctgttttattgatctacgtgtctgttctcttgccaataccaaattgccctgattactagaaccttcttgtgcatctttaaattaggtagtgtgagtcctccaactttgttctccagtatcactttagctattctagattctttgtcttttcttatttttatttttagtagagacagggtttcaccatgttggccaggctggtctcgaactcttgacctcatgatccgcctacctcagcctcccagagtgctgggattactggcatgagccactgcgcctggctgattctttctcttttcatataaacttcaggattagtttcttgaggcctacagagtagcttgctaggattttagttgggattgcacaagaatctagagatcaggttgggaagaattcatgtctttggtttttttttgttttgttttatttttttgagacagagtctcactctgtcacccaggctggagtgcagtggtgtgatcttggcttactgcaacatccgcctcccgggttcaagcgattctcctgcctcagcctcctgagtagctgggattacaggtacactccaccacgcctggctaatttttgtatttttagtagagacggggtttcaccatgttggtcaagctggtcttgaactcctgacctcgtgatctgcccaccttggccccccaaagtgctgggattacaggcgtgagccagcgcgcctggctttttttttttcttttgagacagagtttagctctggcacccaggctggagtgcagtggcacaatctcagttcactggaacttctgcctcccaggttcaagggattcttttgcctcagcctcctgagtaactgggattataggcgtgtaccaccacgcccagctaatttttatttttattattatttattattattttttattatactttaagttctagggtacatgtgtacaacgtgcaggtttgttaacatatgtatacatgtcccatgttggtgtgctgcacccattaactcatcatttacattaggtatatctcctaatgctatccctcccacatctccccacaccacgacaggccctggtgtgtgatgttccccttcctgtgtccaagtgttctcattgttcaattcccacctatgagtgagaacatgcagtgtttggttttttgtccttgcgatagttggctgagaatgatggtttccagcttcatccatgtccctacaaaggacatgaactcatccttttttatggatgcatagtattccatggtgtatatatgccacattttcttaatccagtctatcattgatggacatttgggttggttccaagtctttgctattgtgaatagtgccgcaataaacatatgtgtgcatgtgtctttatagcagcatgatttataatcctttgggtatgtacccagtaatgggatggctgggtcaaatggtatttctagttctagatccctaaggaatcgccacgctgtcttccacaatggttgaactagtttacagtcccaccaacagtgtaaaagtgttcttgtttctccacatcctctccagcacctgttgtttcctgactttttaatgatcgccattctaactggtgtgagacggtatctcattgtggttttgatctgcatttctctgatggccagtgatgatgagcattttttcatgtgttttttggctacataaatgtcttcttttgagaagtgtctattcatatccttcgcccactttttgatggggttgtttgtttttttcttgtaaatttgtttgagttctttgtagattctggatattagccctttgtcagatgagtagattgcaagaattttctcccattctgtaggttgcctgttcactctgatggtagtttcttttgctgtgcagatgctctttagtttaattagatcccatttgtcaactgtggcttttgttgccattgctttggtgttttagacatgaagtccttgcccatgcctatgtcctgaatggtattgcctaggttttcttctagggtttttatggttttaggtctaacatttaagtctttagtccatcttaaattaattttttataaggtgtaaggaagggatccagtttcagctttctttttatggctagccagttttcccagcaccatttattaaatagggaatcctttccccatttcttgtttttatcaggtttgtcaaagatcagatggttgtagatgtgtggtattatttctgagggctctgttctgttccattggtctatatctccattttggtaccagtaccgtgctgttttggttactgtagccttgtagtatagtttgaagtcaggtagcgtgatgcctccagctttgttcttttggcttaggactgtctcggcaatgcgggcccttttttggttccatatgaactttaaagtagtttttttccagttctgtgaagaaagtcattggtagcttgatggggatggcattgaatctataaattaccttgggcagtatggcgattttcatgatattgattcttcctatccaagagcatagaatgttcttgcatttgtttgtgtcctcttttattttgttaagcagtggtttgtagttctccttgaagaggtccttcacatcccttgtaagttgaattcctaggtattttattctctttgaagcaattgtgaatgggagttcactcatgatttggctctctgtttgtctgttattggtgtataagaatgcttgtgatttttgcaccttaattttgtatcctgagactttgctgaagttgcttatcagcttaaggagattttgggctgagacaatagggttttctatatggggttttccttttcttgtcttattgcgctagccaaggctttccgtattatgttgaataggagtcatgagagaagatatcctttccttgatcccaatacttgaggcaaggcagtttcttattaagtatactgttaattgtagatattttatacttattctttatcagattgaagaagtttccctctactcatagtttgctaagagtttttctcatgaatgtatattgtatttgttttgttttgtttttgagacagagtctcgctctgtctgtttcccaggctggagttcagtggcgtgatctcgggtcactgcaacctccgcctcccggattcaagtgattctcctgcctcagccttctgagtagctgggattacaggtgcccgccaccatgccaggctaatttttttatttttagtagagatggggtttcaccatgttggcctggctggtctcaaactcctgaccttgtgatctgcccgtctcagcctcgcaaagtactgggattacaggcatgagccactacgtccagcctggatattgtttttattagcatcaatttatgtgattatatatgtcttccttagtttgttaatatggtagattatattgattaattttgaaatgttgaaccagccttgcatacctggataaatcatattggtcatgatgtataatttttcaatacattgttggattcaatttggcaccattttcttgagcatttttatacctatgttcatgggcaatattggtctgtagttttcctttcttgcagtgtctttatctggttttgatattaggataatgctggtcttatagtataagttagaagtgttccctctgctgcttttttctggaagagattatagagaattggtattattttttctttagatgtttggcaaaattcagcagtggatccatctggatctggtgatttatttttatggaacgttattaattatttatttaatttttaaaatagatgtagggattttgggttatctgtttctccttgtatgacttttggccgtttatatcatttgaggaattggttcatttcatctaaattaccaaatttgtgggcagagttgttaataatattcctttattatcttttttgtatccgtggcatcagtagtgatgactcctcttttatttttgtaattgatcgtttatgtctctgttaattagcctggtttatcaattttattggtcttttaaaggaatgagtttttgtttaattggtttcctctatttctctattgttttcctgttttaaattccattgatttctgctccaatttaatttttattttttatttatgtattgagatggagtcttgctctgttgcccaggctggagtgcagtggcaagatctcagctcactgcaagctccacctcccaggttcacgccattctcctgcctcagcctcccaggtagctgggactacgggcacccgccaccatgcctggctaattttttttgtattttttagtagagacggggtttcaccttgttagccagaatggtgtcgatctcctgaccttgtgatccgcccacctcgtcctcccaaaatgctgggattacaggcgtgagccactgcgcctggccgatttctgctctaatttttattttcctacttgttttaggccaaaattatttttgtttttctagtttcccaaggtggatgcttattgattttagattttttttttcttttactttttcttttttttgaaatgaagttgcactcttgttgctcaggctggagtgcaatggtgggatcttggctcactgcagcctccacctcccaggttcaagtgattctcctgcctcagcctcccgagtagctgagattacaggtgcctgccaccatgcccagctaatttttgtattttttagtagagacggggtttcaccatgttagccaggctagtctcgaactcctgacctcaggtgatccacccaccttggcctcccaaattctttttcaatatatgcatttttaatgctgtcactgtcccttaaacagtgctttcactgcagctcacaagccttgcttgaattttaagatttctgcgatcaggttccatgacctttttttgttctctatatgtagttcttatttatggcttcctgttcctgtttcatggttgcattgcttttttgtctctgagaatattaattagcttctttgaagttttattctgcctcctgcattgtgtcttcctccaaattcctttttttttttttgagacaggatcttgctctgttgcccaggctggagtgcagtggtgtgatcttggttcactgcaacctttgcctcctgggatcaagtgattctcctgcctcagttacctaagtaactgggattgcaggcatgcaccactatgcccagctaatttttgtacttttagtagagacggggtttcactatgttggccaggctggtctcgaactcctgacctcaagcagttcacctgccttggcctcccaaagtgttgggattacaggtgtgagccaccacgcctggcctctgaattccttttgtttgtttggtatctgtttattttgtgcactcttctatgtgcgtggtataaccacaatttaaaaattgaaacaaaaaaaggtaacatgcttcattgaattaagatgccaaaccaatgttattgaaaattcttctgaagtgtacctgttagttttaagtttgttgccagcataattattgttcatttgaaagcgacctttgctctctggctgttctatctttggggtttagtagttttacaatagtgtgtctaaatgtggatttctctttgtatcgtctggtgtaatatgttacctgtatctgttgagttggctttttcatcaattctggaaaaactcccagcattatcttttcaaatatagttgttccatgctgtcttttctccttagagtactccattctcattttgtcttcaataccttttaacctagtttttgtatttttctcttcctcgtccctctgggcattactttaggtaatttcttcagataggtcttcgatgtcattcagttctctcttaagctctgcctaattttcaagcccatttttaaagtatctcttatttatttatttgtctggacctcagatgtccttagttgatggcacacaatcataattagttcttgtaaaaccctcttatttgtttattgtcttttactcccgtttacccttcctagtccccatgctaggtagccaaacagatgtgtttaataatgtatattcttttgtttgtatttattattacaaatttgtatagtttcattgtatttttaaaaagtaagagtttgcaatggattggaggtgtaagaaaaatatttaccataggcagtttgaggaatgttgctgtacagtgtttcaccttccaggattagcttagttgattgctttctttttatgttatttaacttgtcccttatgcttgactttcctgtaaacatgcagttagtttgattagattcagatgcagttttttttaggcagtaatattttttaggtgatattgttcttccacatttattgatggtgaaattgattgttgggtttggatgtgttgacttgatcccaccattataaagttccccgtaaacctttttctctagccttgtaaacatccatttatagccatggcctagtctgtttattgcattcgggattatgaagagatgaattaaaaatttttaacatccttttgtacttattaactggaattcttatctaaagaacttttcatcagtaattattttgttacaaagtatattttgtaaataaagggcaggataaatttttctcttttaatgacaaagctttattgaaatataacagaggcttaatcacatcatataccatgctcatgaattggaaatttcaatattattaaggacagggttccccggattgagatatatatatatatatgtgtgtgtgtggtgtgtgtgtgtgtgtgtgtgtgtgtgtatgtgtgtgtgtctgtgtgtgtgtgtgtgtgtgtgtgtgtgtgtatatatatatatatatatataattaaatttaaagttccaggatacatgtgcaggatgtgcaggtttgttacataggtaaacgtgtgccacggtggtttgctgcacctgtcaacccatcatctagatattaagccccacatgcattatttatcctgatgctctcccctcaccaccacccccccaccccagcaggccccagtgtgtctggttcccctccctgtgtccacgtgttctcattgttcacctcccacttattttaagtgagaacatgaggtgtttggttttctgttcttgcattagtttgctgagaataatggcttttagcctcatccatgtacctgcaaaggacatgatattgttcctttttatgaccacatagtattctatggtgttatatataccacattttctttatccagtctatcattgatgggcatttgggttgattccatgtctttgctattgtgaacatacacatgcatgtatctttataatagaatgatttctattcctttgggtgtataccagtaattggattttgctgtgacaaatggtatatctgattctaggtctttgaggaatcgctacactgtctttgcatagaagtgttcctatttctccacagcctcaccagcatctgttgtttcttgactttttaatgattgccattctgactggcctgagatggtatctcattgtggttttaatttgcatttctctaatgatcagtgatgttgagcccttttatgttcattggccatataaatgtctttttttttttttcctttttctggagaatggggtctcgctatattgcccaggcaggtctcgaactcctgggctcaagctatcctcctgcctcttgcctccctgagagctgggattacaggtgtgagccactgcgcccggccacacataaatgtcttcttttgaaaagtgcctgtcatgtccttgggtaggataaattcttgatttttttcctttaattgatcaattctcagaataattggttagtgccctgctaaccctccaatgagtggtatgttttgtttttgtctttagtatgatttgatcttttgtttttttaaaaaaaatctatttgatttgtgtttagtccttcacagttttcattcatttgatgctcacttgtcccatttaagccagtgcccttcaacttggcttttgtccttttgatattatcccattacttattgacagattcctgtgaggtttctcgggcttatttggtggagtttctgttccagaccagaggttcgtctacttttttcatcttttcataaaactaactgttagtttcttgtgcctctgtcgtatgcttttttttttttttttttgaatttttgctcttagtttattagttttcagtctttcttcttttgtagtataagtgtctaaggtggccaggtgcagtgtctcatgcctgtaatcccagcactttgggaggctgagacgggcagaagacttgaggtcatcgagacagcctggccaaaatggtgaaacccccactcttctaaaaaaggttcaaaagttaactgagcctggtggcgcacgcctgtagtcccagctactcaggaggctgaggcaggagaatcgcttgaacctgggagatggaggttgcagtgagccaagacagcatcactgcactctagcatgcgtgacagagcgagactccatctcaaaaaaaaaaaaaaaaaaaaaaaaagatgcggttccaagatggccgaataggaacagctccagtctacagctcccagcgtgagcgacacagaagacgggtgatttctgcatttccaactgagatttgaagagagcagcggttctcccagcacggagtttgagatgtgagaacggacagactgtctcctcaagtgggtccctgacccccgagtagcctaactgggaggcacccccgagtaggggcagactgacaactcacatggccgggtacccctctgagacgaaacttccagaggaatgatgaggcagcaacatttgctgttcagcaacattcactgttctgcagcctccgctgctgaaacccaggtaaacagggtctggagtagacctccagcaaactccaacagacctgcagctgagggtcctgactgttagaaggaaaactaacaaacagaaaggacatccacaccaaaaccccatctatacgtcaccatcatcaaagaccaaaggtagataaaaccacaaagatggggaaaaaacagagcagaaaagctgaaaattctaaaaatcagagtgcttctcctcccccaaaggaacgcagttcctcaccggcaatggaacaaagctggacagagaatgactttgatgagttgagagaagaaggcttcagacgaccaaacttctccgaactaaagcaggaagttcgaacccatcgcaaagaagctaaaaaccttgaagaaagattagacgaatggctaactagaataacccatgtagagaagtccttaaatgacctgatggagctgagaaccatggcatgagaactacatgacaaatgcacaagcttcagtagccgattcgatcaactggaagaaagggtatcagtgattgaagatcaaatgaatgaaatgaagcaagaagagaagtttagagaaaaaagaataaaaagaaacgaacaaagcctccaagaaacatgggactgtgtgaaaagaccaaatctacgtctaattggtgtacctgaaagtgactggcagaatggaaccaagttggaaaacactcttcaggatattattcaggagaacttcctcaacctagcaaggcaggccaacattcaaattcaggaatacagagaatgccacaaagatactcctcgagaagagcaactccaagacacataattgtcagattcaccaaaattgaaatgaaggaaaaaatgttaagggcagccagagagaaaggtcaggttaccgacaaagggaagcccatcagattaacagctgatctctcagcagaaactctacaagccaggagtgggggccaatatcaacattcttaaagaaaagaattttcaactcagaatttcatatccagccaaactaagcttcataagtgaaggagaaataaaatcctttacagacaagcaaatgctgagagattttgtcaccactaggcctgctgtacaagagctcctgaagggagcactaaacatggaaaggaacagctggtaccagccactgcaaaaaacatgccaaattgtaaagaccatcgatgctaggaagtaactgcatcaactaacgagcaaaatcaccagctaacgtcataatgacaggatcaaattcacacataacaatatgaaccttaaatgtaaatgggctaaatgctccagttaaaagacacagactggcaaattggataaagagtcgagacccatcagtgtgctatattcaggaaacccatctcacatgcagagacacacataggctcaaaataaagggatggaaaaagatataccaaacacataaaaaaggcaggggttgaatcctagtctctgataaaacagactttaaaccaacaaagatcaaaagagacaaagccattacagactggtaaagggatcaattcaacaagaagagctcactatcctaaatatatatgcacccaatacaggagcacccaggttcataaagcaagttcttagagacctacaaagagactttcactcccacacaataataatgggagactttaacaccccactgtcaacattagacagatccacgagacagaaagttaacaaggatatccaggaattgaactcagctctgcaccaagcggacgtaatagacatctaccgaactctccaccccaaatcaacagaatatacattcttctcaccaccacattgcacttattccaaaattgaccacatagttagaagtaaagcactcctcagcaaatgtaaaagaacagaaattataacaaactgtctctcagaccacagtgcaatcaaactagaactcaggattcagaaactcactcaaaactgctcaactacatggaaactgaacaacctgctcctgaatgactactgggtacgtaacgaaatgaaggcagaaataaagatgttctttgaaaccaacgagaacaaagacacaacataccagaatctctgggacacattcaaagcatgtgtagagggaaatttatagcactaaatgcccacaagagaaagcaggaaagatctaaaattgacaccctaacatcacaatttaaagaactagagaagcaagagcaaacccattcaaaagctagcagaaggcaagaaataactaagatcagagcagaactgaaggagatagagacacaaaaaacccttcaaaaaatcaatgaatccaggagctggttttttgaaaagatcaacaaaattgatagactgctagcaagactgataaagaacaaaagagagaagaatcaaatagacgcaataaaaaatgataaaggggataacaccaccgatcccacagaaatacaaactgccatcagagaatactataaacacctctacacaaataaactaggaaatctagaagaaatggataaattgctggacatatacaccctcccaggactaaaccaggaagaagttgaatctctgaatagatcaataacaggctctgaaattgaggcaataattaatagcttaccaatcaaaaaagtccaggacaggacggattcacagccgaattctaccagaggtacaaggaggagctggtaccattccttctgaaactattccaatcaatagaaaaagagggaatcctccctaactcattttatgaggccagcatcatcctgataccaaagcctggcagaggcacaaccaaaaaagagaattttagaccaatatccctgatgaacattgctgcaaaaatcctcaatcaaatactggcaaactgaatccaacagtacatcaaaaagcttatccaccgtgatcaagtgggcttcatctctgggatgcaaggctggttcaacatatgcagatcaataaacgtaatccagcatataaacagaaccaaagacaaaaaccacatgattatctcaatagatgcagaaaaggcctttgacaaaattcaatggcccttcatgccaaaacctctcaataaattaggtattgatgagacgtatctcaaaataataagagctatttatgacaaacccacagccagtatcatactgaattggcaaaaactggaagcattccctttgaaaactggcacaagacagggatgcctttctcaccactcctattcaacatagttttggaagttctggccagggcactcaggcaggagaaggaaataaagggtattcaattaggaaaagaggaagtcaaattgtccctgtttgcagataacatgattgtatatttagaaaaccccatcgtctcagcccaaaatctccttaagctgataagcaacttcagcaaagtctcaggatacaaaatcagtgtgcaaaaatcacaagcattcttaaacaccaataacagataaacagccaaatcatgagtgaactcccattcacagttgcttcaaagagaataaaatacctaggaatccaacttacaagggaggtgaaggacctcttcagggagaactacaaaccactgctcaatgaaataaaagaggatacaaacaaatggaagaacattccatgctcatggatagggagaatcaatatcgtgaaaatggccatactgcccaaggtaatttatagattcagtgccatccacatcaagctaccaatgactttcttcacagaattggcaaaaactactttaaagttcatatggaaccaaaaaagggcccgcattgccaagtcgatcctaagccaaaaaaacaaagctggaggcatcacgctacctgacttcaaactatactacaaggctacagtaaccaaaacagcatggtactggtaccaaaacagagatatagacaaatggaacagaacagagccctcagaaataataccacacatctacaaccatctgatctttgacaaacctgacaaaaacaagaaatggggaaaggattccctatttaacaaatggtgctgggaaaactggctagccatatgtagaaagctgaaactggaatcccttccttacaccttatatgaaaattaattcaagatgggttaaagacttaaatgttagacctaaaactataaaaaccctagaagaaaacctaggcaataccattcaggacataggcatgggcaaggacttcatgtctgaagcaccaaaagcaatggcaacaaaagccaaaattgacaaatgggatcagattaaactaaagagcatctgcacagcaaaagaaactaccatcagagtgaacaggcaacctacagaatgggagaaaatttttgcaatctactcgtctgacaaagggcagatacccagaatctacaaaaaaactcaaacaaatttacaagaaaaaaacaaaccaacaaccccatcaacaagtgggcgaaggatatgaacagacacttctcaaaagaagacatatatgcagccaaaaaacacatgaaaaaatgctcatcatcactggccatcagagaaatgcagatcaaaaccacaatgagataccgtctcacaccagttagaatggcgatccttaaaaagtcaggaaacaggtgctggagaggatgtggaaaaacaggaatgcttttacacttggtgggattgtaaactagttcaaccattgtggacgtcagtgtggcgattccttagggatctagaactagaaataccatttgacccagccatcccattactgggtatatacccaaaggactataaatcatgctgctataaagacacatgcacacatatgtttattgcggcactactcacaatagcaaagacttggaaccaacccaaatgtccatcaatgatagactggattaagaaaatgtggcacatatacaccatggaatactatgcagccataaaagaggatgagttcatgtcatttgtagggacatggatgaagctggaaaccatcattctcagccaactatcgcaaggacgaaaaaccaaacaccgcatattctcactcgtagttgggaattgaacaatgagaacacctggacacaggaaggggaacatcacacaccagggcctgtcgtggtgtggggagatgtgggagggatagcattaggagatatacctaatgtaaatgatgagttaatgggtgcagcacaccaacatgggacatgtatacatacgttaacaaacctgcacgttatgcacatgtaccctagaacttaaggtataatataaaaagtatataaaaaaaactccagagaagtttatagaaagagatgacatgtaaaccctgctgaaaaatagtttcatttgttagaatataattgtcttccactaaaaaaagaaaaaaaaaagcatttaaggctctaagtatctcttgaagtaccacttttcctgaatcccagagtttttatgtgcattatttttatgcgtttgtagtttgatatgttgtatttataagtagttttagctttccattatgaattcttctttgacccatgagttatttaggtaagtgtttaaaaatttacaatagtttatatatgcaaatattatgttgttagagttggttttcatgtcatttttacatatacaggggcagtttccccaactaaattgtatattccttaaagcagcactcttaaattttatttctgtgtcaatttcttgactgtgtttcctggcatggaatacatggcataaaatttgttatgtaattaaatgaaatattattatactttctattttttaggcatacaagaattaaattctgaataagtctgcaggtaggatggacagttattttaaagcagctgtcagtgacttggacaaactccttgatgattttgaacagaacccaggtttgttgattttccatttttgccgctaatgggatttaaaaatatctgtaattaagttatctcaggtatacagtaatattagcaaaattttctttcaattttggtcacgttatcttctgcaaaaagttcatttatttcataataagatgttagttgattcttagactgaatgggacccatagccagaaacagaagtaaggaacctagaaagtttttttctagatacaaattagctataagacagacatttcttttcttttcttttctttttatttttgagacaaagtctcattctgtctcccaggctgaagtgcagtggcacaatcagagctcattgcagcctcaacccccgaggctcaagcatttctcccacttcagcctccaagtgggaccataggtgcatgccaccatgctggctaatttttcagttatttgtagagacagaatcttcctatgttgcccaggctggtctcgaattccggggttcaagtgatcctcctgcttcagcctaccaaaatgttgggattataggcatgagtcatgtacttggccccagaaagaccaacatatgagcaagctaaaagcaacttgagagttctgcatgaattgatatttcattacaacaagagatggtattttattttattattatttcttttttgagatggagtttcactgttgttgcccaggctggagtgcagtggcgccatgtcagctcactgcaacctccacttcccgggttcaagcacttcttctgcctcagcctcctgaggagctgggattacaggcaccccccaccatgcctggctaattttttgtttgtttgtttgtttctgagacggagtctcactctcttgtccaggctggagtgcagtggcatgatctcggctcactgcaacttctgcctcccaggttcaagcgattctcctgcctcagcctcccgagtagctgggactacaggtgcccaccaccatgcccagctaatttttgtatttttagtagaaacggggtttcaccatattggctaggctggtctcgaactcctggccttgtgatccacccgcctcagcctcccaaagtgctgggattacaggcctgagccaccaggcccggcctaatttttgtatttttggtagagatggggtttcaccatgttggccaggctagtcttaaacgcctggcctcaggttatccgcctgtctcagcctcccaaagtgctgggatgataggcgtgagccaccacgtctgggtgttattttctttaaaacgaagactaggaaactggaagtcaaaacaaagacgttggattgttttttagttcttccttagtctggtttttatagtgcaactaagtttcttttttttctaagagacagggtcttgctctttcaccctagccggagtgcaatggtgcagtcatagctcactgcagccttgaattcctgccctcaggcaatcctctcacctcagccttctgagtagctgggaccacaagtgtgcgccagcatgcccggctaatttaaaaatgtgtatattttttacagatggggtctcactgtgttgctcaggctggtcttgaactcctgatctcaagttatcctccgaccgtggcttcccaaagcgctgggattacagttgtaagccaccattcctggccacaactaagttatttttttgagtggaatttttatcactttatgatatctacattcaaaagtaaaatccaggaagtaatttaaagtcaaataaaaatagctttgggttctctctcctgctgccttgtgaagaaggtgcttctcctttgccttctgccatgattgtaagtttcctgaggcctccctagcaatgcagaactattggcttcttttatctggatgtggctgtggccatcaacagctccagattcacactgacaagtctccttcctttcttcaaatttggagtaacaggagaatgcctcttaagtggcccatcttgaaaccatcacatgcccatcaccgtggccatagcgtgtgatgctactacaattggcaacctcaattagagcaccacaggggagtgagggtaggatccaggtgacagaaaaatgaacaagtagaaagccaacttgaggagtcctcccaaacaaagcaaagatcaaggacatcaaattatcagagcaactatgcatgagatcaagatctaaggacattcgtttatgcagtcagttagtcatttcttgaacacttaagtttcaggaattattttaagcaataggggtgtaagtcagaaaaaaaagagacaaggtccctgcacttgtgacacttactttctagttaattgaaacagccaataatcacaaacaagataatttcagataaaaataaatgctctaaaggaaatacaaaaatagttttggaggtgatttgtgttttgcaaaaggataatctatgttcttttaaaaaagtgtatttagtttagaagtcttgggaaacataatatgtttaataatttttatttgatttaagtctcccgaataacactgtttctctatttcagatgaacaagattatctccaagatgtacaaaatgcatatgattctaaccactgctcagtttcttcagagttggcttcctcacagcgaacttcattgctcccaaaagaccaagagtgcgttaatagttgtgcctcatcagaaacaagctatggaacaaatgagagttccctgaatgaaaaaacactcaagggacttacttctatacaaaatgaaaaaaatgtaacaggacttgatcttctttcttctgtggatggtggtacttcagatgaaatccagccgttatatatgggacgatgtagtaaacctatctgtgatctgataagtgacatgggtaacttagttcatgcaaccaatagtgaagaagatattaaaaaattattgccagatgattttaagtctaatgcagattccttgattggattggatttatcttcagtgtcagatactccctgtgtttcttcaacagaccatgatagtgatactgtcagagaacaacagaatgatatcagttctgaattacaaaatagagaaatcggaggaatcaaagaattgggtataaaagtagatacaacactttcagattcctataattacagtggaacagaaaatttaaaagataaaaagatctttaatcagttagaatcaattgttgattttaacatgtcatctgctttgactcgacaaagttccaaaatgtttcatgccaaagacaagctacaacacaagagccagccatgtggattactaaaagatgttggcttagtaaaagaggaagtagatgtggcagtcataactgccgcagaatgtttaaaagaagagggcaagacaagtgctttgacctgcagccttccgaaaaatgaagatttatgcttaaatgattcaaattcaagagatgaaaatttcaaattacctgacttttcctttcaggaagataagactgttataaaacaatctgcacaagaagactcaaaaagtttagaccttaaggataatgatgtaatccaagattcctcttcagctttacatgtttccagtaaagatgtgccgtcctcattgtcctgtcttcctgcgtctgggtctatgtgtggatcattaattgaaagtaaagcacggggtgattttttacctcagcatgaacataaagataatatacaagatgcagtgactatacatgaagaaatacagaacagtgttgttctaggtggggaaccattcaaagagaatgatcttttgaaacaggaaaaatgtaaaagcatactccttcagtcattaattgaagggatggaagacagaaagatagatcctgaccagacagtaatcagagctgagtctttggatggtggtgacaccagttctacagttgtagaatctcaagaggggctttctggcactcatgtcccagagtcttctgattgttgtgaaggttttattaatactttttcaagcaatgatatggatgggcaagacttagattactttaatattgatgaaggcgcaaaaagtggcccactaattagtgatgctgaacttgatgcctttctgacagaacagtatcttcagaccactaacataaagtcttttgaagaaaatgtaaatgactctaaatcgcaaatgaatcagatagatatgaaaggcttagatgatggaaacatcaataatatatatttcaatgcagaagcaggagctattggggaaagtcatggtattaatataatttgtgaaatagttgataaacaaaatacaatagaaaatggcctttctttaggagaaaaaagcactattccagttcaacaagggttacctaccagtaagtctgagattacaaatcaattatcggtctctgatattaacagtcaatctgttggaggggccagacctaagcaattgtttagccttccatcaagaacaaggagttcaaaggacctgaataagccagatgttccagatacaatagaaagtgaacccagcacagcagataccgttgttccaatcacttgtgctatagattctacagctgatccacaggttagcttcaactctaattacattgatatagaaagtaattctgaaggtggatctagtttcgtaactgcaaatgaagattctgtacctgaaaacacttgcaaagaaggcttggttttgggccagaaacagcctacttgggttcctgattcagaagctccaaactgtatgaactgccaagtcaaatttacttttaccaaacggcgacaccattgccgagcatgtgggaaagtaagttataaaaatcttttaagtcttttgttcttttgagacattttaaacaaatacaatgtgatagaaaaggctgatgaacagataattacaagattgagttagtttaaaatcagtgtttttcatctaccagtcagggaaatatataaagcagtgtcattttgcagattgcttgatggttgaataaatgttacattgtcaggggcattaagtacatgctgggaaatgagaaacaattatttagttactaatttttgtgacatttaagaatatttgttcttatctctctaatattgacacattaaatattccagatttggtcagattcccctttgtccttgaacatttaatttcaagaccaatctacagctagtgttgtgatcaatgcccagggaaacactccagagcaaattggcttccacagggttcagaatactgaagctgaccttgagttctgactgataacagtcaagataaaaagattgtctataaattctaagggttgcccatagaaatcctattacatttttattcagatttttcagtaatatgttggtttcagatcagtcctatttttttttaacaaaataacattttactttaaaaagttttaaatgaagaactacagagaactttttaatattatgaacttattcattaaagatagtttttgttccctttccaatgaacagaattgatttaaaggaattctccttatcagaaatatggtatcaaattgcagaaacctcatttaagttacaaaaaaaagaatcatttaagaattcctatgattatggtgattaggaaatgatttatacaataaggaaaaagaattttggttaattaggtttaggacctccccacactgcctctagtaggtgtaagtattcttgaaacaaagacaaatttgatattttattctttataggtattttgtggtgtctgttgtaataggaagtgtaaactgcaatatctagaaaaggaagcaagagtatgtgtagtctgctatgaaactattagtaaaggtgagtattaacttgatatattttcttccagtaattgaatatatcttaaaattaattggattgtgacaaagataaacttctttattttcttaaggcaaggacctagtgttgaattatctggcttaggtgggacatcccaaggcttggtttctcttctttttgttccactctcacaattaatactaccaatctggaaaggaagcattcagtttctggagtggcagttcattaacttttaacaggtaccaagtccctaaatgctgcatttcatctgcctatttgtttttgtcatcatcattgtcatgttaatcatcttaatctaaataaacacttacagatacctaccaatagtagtactcaatattatgtattaatagcacagggcaagataatagttcacaccctttagaaaataacaacctaaaatgagagtagaagataaggtggtaatatttatgattttataaattcataggactgccacactatttgcacatttttgtctcatgtttttttcttttctcaactttagaattttgcatatgtacacttcccattatttctttggctctctaattagctacaattattagcaatattcttggtggtctttgagttctcacaggtgtgtgtgtgtgtgtgtgtgtgtgtgtgtgtgtgtgtgtgtgtgtggtgtttttttccccaagtccatgtttattcttttgagtaccacttggcattttcaaagattcgttgacagtttaattcctagcaaatattacttgggccttttttgaccagacctgtgcactagctcaggcactgcttcctgttagccaggggaatgaatacctgataataatttgtttttctcttttgaatgaagataacttttttcagcaattctccaaaaagctctgatgtgagtctgttagcctgaggtaagctgcttttctccctgctgttgacctctgctctggaagataacaaagcgtaaatctttttatgtttccatgttaccaccattgtttatgaagaggttagtttaagtgcttatagttgttttgttttttcttatgctgtttcagtagcctagaagatgactgctggtgctgttagccaaggcaatctgctagaattcagaaattttagagcaagctcccatataattatctcccccacttaaaaagaaattaaacatccatgaagatttgaaacgttatttatgttgacaggtcagatttttgggtgaacattcagacatattttgactctaagggtccaggaggggagaagatatgatcattaaagaaattcagtagaatactgagatcaagctttggtttatcaaagaaaatactgtggaatgagcttatttagttatctgttcaaattctattttgatgtcttatagcatatagtttcatttatggtgctatttgtcattaattcatatgccacaggagagcataaataaaagttaataccagctttagggttgaaaataatagaagtgatcatttaaaataatggtatcaaataagaagagaaagacggttcatgggttgtgagacatatgccatgaaggattggaagaaaaagataatttgaatagagattgtagataatgagaaagctgtcctgagattatgtgagtttcaaggaagcacacgtgaatatcaataagtagatttgaggcaagttagaaattactttgaaatccagagtaaagtgtttggatttcacttggttaatggaagccattttatgagtgccatcattcagtggcacttgaggaagattgttttagcagtggcagcattgatagcagatcagtttggagaaatgctgaagggagagctatcagtgttccttattttttggatgaagaatcactcagcagtattcaggcactattctgcattctgaagttcaagcagagagcaaaatagaagctatattctcatgaaatttatgaatgtatgtagagatggatagtaaacaaaaagatatcagatggtgataataccctaaattaaaaaatttaaaaagtgtaagagtgatagatagttaacagattagtggcaaaaggaaattttttctttttgagatggagtctcactctgtcactcaagttggagtgtagtggtgtgatctcagctcactgcaacctccacctcccaggctcaagcagtcctcccacctcagcctccctagtagttgggaccacaggcacacactaccacgcccagctaattttttgtatttatggtagagatgcggtttcaccatgttgcccaggctggtctcaaagcaatcctgagcttaaacgatctgcctgctttggcctcccaaagtgttgggattacaagcatgagccaccgtgcctggtcttaggtggtattttttataatgtgatcagagtaaggctttatggtaatatgacatgtgagcagagtcttgaaggaagtgagataatgaagccgtgtgagtacgagaagaacattctaggccaagggaataataggagcaaagattctaagctggaggaatacttacttgaagaacaaggaggtctgggtagctgggccatagtgaatgagtgggattgtagtgagagatgaggtcaaacaggtaactgggaaagtggaggaggtaaggatgaattatgttgggtcttgtgagccattgtaacaacttaaattttcactttaggtagccattaaaggattttaaacagaggaataatgagatatgatttatgtctaaaagaatctctctaaactatgttggaaatagactctaggggtacaagggcaaaaacagagacagtcatgtaataagggttactctctgtagatatcaaacatacaccagatataatattgaaataacttattggtagcttatcaaagtggcatgctgccaactaaagagcctgtgctggctactcagacagtatctttgccaagtgctacttctttttcttgattagccatttctttctttctccttacaacttgaaaaatagaatatttattgtaatttactttgaagtaaattccaaaaacatctgagattttaacactattgttttcccctttatagctcaggcatttgaaaggatgatgagtccaactggttctaatcttaagtctaatcattctgatgaatgtactactgtccagcctcctcaggagaaccaaacatccagtataccttcaccagcaactttgccagtctcagcacttaaacaaccaggtgttgaaggtaatagaagaaaactgtgtcttagactaaagataaattattgaaatagaaattctctaatgtagccagagtctagtcaggaaagagaaaccagactaggtatcaagagagatttaatacagggaattggttacacatgcaggctggaagactggaagagcaaaaaggctgtgctcaagtgccgcagcaattagtaactgcaggaagcaaccaccacaactggagtttggggctacaaaaggggagaggctagagctcagtacaggagcaccaggaggtgcttggatctcagatgtgggagtcagaagccctggtcacagcaccatgaagaggcctcatatagttggtactcagatgactaaagtagacctccagatttgatgttaggagtactgaaaatcatgagtctagcagctgtatctgttggtggtgctgctgcaaagatcctggcaggaaccagaaacaaagaattccttcttatttcttcccaccttatggtctcccaccagtgcctgctattggaaaaagctgaccaaagccagtaacaagagagtctgggaattgcactttccagacttccagcctggcatccaagagcccactgtagagggtgagcttgggtttgagaggcaataggtaaataattgttctatctccttttccttaaaatctatttttaattgtgtattttaccacagaaataatattttttaaatctatttttaaatctttgagttgtctgttcttttttacaacctgtcatcaattagcatcttgggtaaggcacatgtaggtctttaaatatgaattattagtctgtaacatgctagaaaagaatcataagtatcagttaaaggcaaatttgaatcctatttttgtggacttcagtttattactcagtaactattttccatttattataatgaaataaggagactcagcattatatggtcgtatattatagctctaaagatgaataatttgtgtttgaaaatatgtatatattctattgataacccaaatgattaaattataaaaatgttgcaaatacaagaaagatatcttatttaatatgtctacctacattgcaaaaaatatgtatatataattcaaattttttcagagttatctttatgatgttctggaaagcagacattgaactttttttttttttttaaagtattctaaaatcatctggcagagattttcgtaaccttcctctatggatgctttgtaagaaaagagaaaaatgtttatgctgatatctagttatttccttcaaatttgaaaggaaatattgatacatatgaataaaattcagtatccacattataagaacaaaaaatgttatgcttctcttgttaaataaaagaaagaaatgtcctgtggtagtaagaaatgtcctgtgatattaagacatttcaagtgatcctgttacctttttttaggtttttaaatttctttttttctttatatatatatatgaagaatatatagataagcaatatatatatatgcttcagtctactgcacttttcatcactgtactttagtccctaaattttattcagtctctactccttactcacacaaacagcctcaataatacaggctttaaatcgtccttccctgttgtctttaaggtgtaatctctcctatctactcctcttcagagtgattcccagacccacctctggtctaatatgctatgaattagatagatctcctgtccattccttttcatagtatatgattgccaaggccactcctgctccctttgtacgaattagatagaaacagactccacttaggatagaggaatcacaaaaggccatttctctagatctttgtagccctgagaattcaggggttgccagtggatagcaaaaagcttttgaaaacatttcacaatctttttggcattaaatcattgccatattaccagattcaaatgttttactttttcaattgattctaggactatgttccaaagaacagaagagagtatggtttgcagatggtatattgcccaatggtgaagttgcagatacaacaaaattatcatctggaagtaaaagatgttctgaagactttagtcctctctcacctgatgtgcctatggtaaggaattcaaagaataacttaattgactaaacaaaattttatttcgtagataattcctggtgtgattattagagtgcttttttttttttttaacactttgagcttcctaaaataagagatgtattgatatagtgaatatattttagattttaccccctttaaaaaaaagagagagacagtcttgctgtgttgtccaggctggagtgcagtggcataattaccagtcactgcaggctctaactcctgggctcaagtgatgcttccacttcagcctcccaagtagctgggatcacagaagtgagccaccatgcctggtttagactttactgttaaaaaaaatgtttttttaattactttttttttttttagagatgtggtctcactattttgcccaggctggtctcaaactcctgatctttagtaatcctcccatctcatcctcctgagtcattgagattactggtataaatcaccacacctggcagattttaccttttttttttttttttgagatggagtttctgttgcccaggctggagtgcagtggtgcgatttcagctcactgcaacttctgcctcccggattcaagtgattctcctgcctcagcctccggagtagctgggattacaggcatccaccaccacacctgactaatttttgtatttttagtagagacgaggtttcaccgtgttggccaggctggtctcaaactcctgacctcaagttatctgcccatctcggcctcccaaagtgctggttattacaggagtgagccaccgtgcctggcccagattttaccttttttaaatgtcagtttaagagactggttctcacactttcagcttcaggacccctttatactcttattgagaaccctaaagtgctatagatttcgtgggttgtacctattgataattactatattaaaattaaaattcagaaatttaaaaaatatttattaactaattacaaaataaggctattacattagcagaaataatattttatgaaaaatttttttcagaacaaaagtttagtgagaataatggcattattttacatttttgccaatttctttaatgtctggcttaatagaagacaaacatattctcacatctggttctacattctgtgtgttttgatatgttattttttttgttaaattatatgaaaaaaattctaggacctcaccaattccctgaaagtgtcttggggaccccagggatctctgaaccacattttgagaaccagtggtatggggaaatgtaactgagatttagtaatttaatttatactaatatctatttagttattttcaaacattcaagaaagtatgtgatggtgatatttatgcttacatttacacaaatgtgctaggtgttaaacagaagatatataatatagaatccagatcactaagaattctcattgtaaagtggcacatactcatagaagcaactattaatgtatgaattagtaatgttttatgcattaaatagatttattgagcatcactttgtgccagtcacctggtcgattctgggtacgtatattagaaaagatggatactaggcctggcgcggtggctcatgcctgtaatcccagcactttgggaggccgaggtgggcggatcatctgaggtcaggagttcaagaccgcctgaccaacatggcaaaaccccgtctctactaaaaaaaatacaaaaattagccaggtattgtggcgcatgcctgtagtctcagctactaggggagacggaggcaggagaaaatcacttgaacccaggaggcagaggttgcagtgagccaggattgcgccaatgtactgcagcctggacaacagggtgagactccatctcaaaaaaaaaaaaaaaaaaaaaaaagagagaaaagatgaatatttatcagctctgttgaaatttacatttggtagaaacatatgctgtttgtcaagagttcatgagctagactttacaaatagccgtaattaccatgggtatgtttcctagctagcacgcactgtcaatctgtattaatgaaaattctcaacaggctagtaaatattgagttcataaatggttcttatttaatactgactttgtacagtctaaaaagaaaaaggctttattgaaatagtctttatgggtagttttttccaggtggttactcttgtggaatatagctaacgcactgcttcctaaccactcccctccccttcttcctgccttgtccctcctccctgcctacccaagggtttttggctatcataagaaggggagagacttggattgaactaagcttgctcactgtgtgatatggtatgggatcttgaagttcttcttgcctcattttttccaatcttaatattaagtcattaatacctgcctgagcatgcagtaaaactaaaaccttatgcttcttaattccttatgctcctgaatttgaagaatcaaaatggtactgtttcttgggaaatttgactttaagagaatttctgaacgcattttggtttttatttattcttattaaaaagatatgtttggctatagtgatctcatttcatagttgaacagagaatatgaactgatttgttattttttttattacatattttacagacagtaaacacagtggatcattcccattctactacagtggaaaagccaaacaatgagacaggagatattacaagaaatgagataattcagagtcctatttctcaggttccatcagtggaaaaattgtctatgaacacaggaaatgaggggttacctacttctggttcatttacactagatgatgatgtttttgcagaaactgaagaaccatctagtcctactggtgtcttagttaacagcaatttacctattgctagtatttcagattataggttactgtgtgatattaacaagtatgtctgcaataagattagtcttctacctaatgatgaggacagtttgcccccacttctggttgcatctggagaaaagggatcaggtagggaagcagttatttaaatttaaaaagatttaaaaatatatactgatgaattttatctgtgacatatgaaatgtatttttttaacttagtttggttgcaatatgtactaaggctggtaacttttgtttacagaaagtcttattatataaaaacaaattctaaaaatatttgaacttttatgatccatttatcacatctggcccactaatttcgaatgattaagtctatgagggaagctcatagacttttagcccgaagaaatatttccattgtattagaattttgacactgtattattactatttttttttaggagcatgatacctaaagaaaagagcattagattggatggcaaagctaggaattttagttccttgtctgctactttttacatctatgacttgtagtgtgttaatctccttgggccccagtttcctttgtaaatagaacctagatgatttctaaggtccttttcaagcaggagattctatggctaacccccaccccagagtggtttctaggatagacacttgtcactccaggcattatgtcacattctgcaatatgaaatggcggttctctgcgtgataatgtagaggaatgaagctttggatttctgttctgtcagtgggagccattacatgaacctagctgtagtggcaaaaatatagtaagccctattctttgtatgccatgcatatctttctattgattgtcaagatctttttttttttgctacctggtcactgatataggcatatggtagcaagtagctgatataggcatgtggtaacaagcagcatatataacgtggctctagactactttcatagacttgtaaatatcaaaaattataaatggagtgcttaccaaactggaatctactttataaaaacgtttgtcttcaaactttgaaggtgctaaaattatatacatttgctgtttaatcaacagtataaatatactatatgtaatatatgcattacagtattagtaactttacatggaaagaggtaaaaattagtatataacagttgtctggggtgttgattttatgaaacatgtttgcttctgtttttaaatttgatcaggccactggtggatttataaatttgtttttttcatttgtaagcatatttaacaggatatttatcctgattaatatattactttcatcatttagtgcctgtagtagaagaacatccatctcatgagcagatcattttgcttcttgaaggtgaaagctttcatcctgttacatttgtcctaaatgctaatctactcgtgaatgtcaaattcatattttgtaagtaataatttatccttatttgcttaattggtaagcaggatttctgaattaattacatcttcaggttagattttgactggccatggtgaaaaataagcaggattggatattggtttttcagccacatatgactgtaaataaattttgcaaatttatgttcagtaggacttgaaacatgagcttacagatttttattagcatccctgtcaatcttaggttaaggtcatgggcttatataactgagctgtattttgatactcatgatacaattgactatatttcctgtggcttttagataaattgaaatttggtaactgaaataagcaggaaccctgatttagtagcaataaagacagttttaaagtaagtgacatgtgacctaattaaaaaggaagtaatcattaataattaataatcctcactactccataatgtatctgtcagcttttcattctatttgaaactaaattcttatccactacatttcagcatttagtgcatcttttattttagtgttatttattaattggctccctatgataatcctttttcttactttatataaatcttatacaattcaatttaaggttttcataaggagaactttgggaacacaaggaatttgaaaagttatgttaaatgcaaaaacaattgttcttagttttttgactaatagaagttgacattaatagttatattcttttatcatctaagattcctcagacaaatattggtacttttcaaccaatggattgcatggcttgggacaggcagaaattattattctattgttatgtttgccaaatgaagatactattcctaaggacatcttcagactatttatcaccatatataaggatgctctaaaaggtatggcattttattttgaactgttcagactggggaatggataaattagttaaaggcatttatggttttggctgtgctagctatactaaagatttatttctgtgaagagattgctgatttctgaaaatagcttaataattattttgtctccttaaaactagcattttatgtgattagtgtctatgcagatttttgtattttaaaaatggaaatatatccttatatccattttttttttttttttttttttgagacagtgtctccaccccggctggagtgcagtggcacaatcttggttcactgcaacctctgcttcccgggttcaagcgattcttctgcctctgcctctcaggtagttgggattacaggcacatgccatcatgcccagctaatttttgtatttttagtagaggcaaggtttcaccatgctggccaggctggtctagaacttctgacctcaagtgatccgcccgcctcagtctcccaaagtgctgggattacaggcatgagccactgtgcctggcctgcctccttgatttttcagtgtatctatgtaatttccttactgtctgtacaagactaggagatttgataatttttcacttgaccatgccgtaaggagaaaaattggaaggttggaaacattttcaaatttttgttcataatccccaatatctaggaataactgggagctttgtgtacagaaggtatttaatagatgcttttgcaagaacagaaataagaaaaaaaatctatagtgtcttaacttcagacagtttatattgggacagtttatatgtattggatcagttttttggattttggacaaactaagaacatttcttcaaaacaataacaaaacaacttaaaatctttttactaatgattttatttgcaggaaaatacatagaaaacttggacaatattacctttactgagagttttctcagtagcaaggatcacggaggattcctgtttattacacctacttttcagaaacttgatgatctctcattaccaagtaatccttttctttgtggaattcttatccagaagcttgagattccctgggcaaaggtttttcctatgcgtttaatgttgagattgggtgcagaatataaaggtaagttttagagtaataagttaaattgcatattttcaaatatactgaatgtaaagactttcagggaatcattaaaatcaattttaatggattaatggaactacttttgttttgctatgcttttaaagttctaagacaaccctcttctactaccaggttggtctagataactgtggtatgtcttcaagtttctagatgttcataagttcttttattacctaaaacttttcttcttaaatttcagaacaaaacagaaaactttcacagtgcaggttgagtatgccatatctgaaatgtattggatcagttttttggattttggactttttcagattttggaatattcacagagtacataccagttgagcatcccaaattcaaaatctgaaatgctccagtgagcatttcttttgagcatcacgttggcatttgaaaaagttatagaccgggcatggtggctcacgcctgtactcccagcactttgggaggccaaggcgggcagatcacatgaggtcaggagttcgagaccagcctggccaacatggtgaaaccctgtctctactaaaaatacaaaaattagctgggtgaggtggcaggcgcctgtaattgcagctactcaggaggctgaggcaggagaatcacctgaacccaggaggcagatttgcagtgagctaagatcatgcctctgcattccagccagggtgacagagcaagactacgtctcaaaaaaaaaaaaaaaaaaaaaaaaaaagttacagatttcagagcattttggatttcaggtttttagatttgggatgttcgatatgtgttaattacttttgctaaaattttcttaaaagcatatactattgggagtttgttatgttgcctgcatattaagaagataaatcgttgcgtctctcaatttttctatatcataaagccagacataaaggatttttgggttagcagtgctattgttttcagttactcactataattaaaagctaactatttttagggaaggaagtacttaaaaattgtggttatttttctaagcttgatgattcttatttttatattctgatgtttgtctctcaaaggtgatagagcctgtatcattcatgtgtatgtacgtgtgtgtatttacttatctacccttgacacaactggtgattctaaagctgctgtgatgtttatatatatgcttatttctgagttagaatcatttctagtgttaaacttttttgaattcccactgtatcttttatctgacttttttcaagaaataatatatttattgcatttgaagtatatcacgtctaatgaactttttagacatttgattctaatataatttggtagggattttcttggaggaaaattaaatgttgagaagctataaaagtggtgattactatttcagaatagacaaattgagagaaagagagaatctatttggaaattttattaaactgtgattttgtggatgggggttctttaccatttaggatttacatgtgtgatgctattaacttgtgggaaaagtaacaaaatttaatttgcatctcaggttttgtactgtgtgaaacaaagagcttaagaaatttcactttaagccaaatgtttcatcaatgcagcccagtattttgcctctaatttaatatttgaatgcttttttaaatagaagattaggggaataaactagctaatcaaattattatggaacatgtaagtatggccagtattttggccagtagtacttctagatagtaagttttctcacactgaaggttggagaatcatggagcaatacgaagggcttatcataaatcacggggactgaaactgcaaagctatgataagctatttagtggtaatgaggggaaattgtcagttatacatagaagttaattcacctcagctgttttctgaattctttctgttctgctagattttacatagactggcactttgacattgttggtgcccatgtctttttagatgtgaactgtgtgtgtgtctgtgtgtgtattttgttacagaggtaatgtacatttgaaaaagctaatgtgaaagttaaagtcccaagaataaagactaaaagtaactgtctcaaattagtaatttttaaatgcttttgaaaatatctgtggttttatgttgagatcactggttttgaataccattaaatgttcaaatagatgatttatgaggtccctttgtaactcagatagtatgtcattctaagccataacctgttgagaatagtgttttaaacaaaactacctcttcatattgcaaaggttgccccctcattcatataaggcaaaaagctagcagttaatcatttcctttatcgtttttatgtcttttcacactaatatcttgtatttttttcaaatctagaccctctgtctttcaaataacttagttgcctttttagaattacaaaatatgtttgtactagcaagaaaatgactactttgacttaagtctttaaagcagctaatgttgggtatgtggtgtttctttagaattttaaggaagtatatttgtataatagacattagagagattagtttgcttaagacctaacttgagaactgaaggttacaaatgtgtctgtgtcttatcactatagaaatagtcttgccttccttttcttcagagtgcctgctgcgttaccagtaaggtctcttttcctttttggtgtccagaatttatggtgccctaaagaaagaacatagttaggtggccgacctcatgtcccttccctttttgtgcattggtttccctgactctatctgtatattcctttttttttttttttgagacggagtctcactctgtcgcccaggctggagtgcagtggcgcgatctcggctcactgcaagcttcgcctcccgggttcacgccattctcctgcctcagcctcccaagtagctgggactacaggtgcccgccaccacgcccggctaattttgtttttgtatttttagtagagacagggtttcaccatgttagccaggatggtctcgatctcctgacctcatcatctacccgccttggcctcccaaagtgctgggatgacaggcgtgagccaccacggccagccccagtatatttcttttatcatgctgaaccaagaactttaaaagtttactaccattcataaattagcacaattgaatattagttataaatgccttaaaagtctttagttctttgtatttctctttaaattatcagaaacctatatcgttctaaccaattatcataattttccaccccctataattttgtggaaacaagatgtataatgaaaagatgaaatactctcgaatcagacaagcctaatttcaaatctgtttcaccaattattagtcactaggagcaagttgattaatttctgtgtctcaactttctcatttatgaaatagtatagacacactccattaggttgttgaatttaaataagataatgtatgtatagttcccagttcaatgtagcatctagtagatacatagatacacagtaagtgttaatattgtctcttggctgggtgtggtggctcatgcctgtaatcccagcactttgggaggccgaggtgggtggatcacctgaggtcagaagtttgagatcagcctggtcaacatggtgaaaccctgtctctactaaaaatacaaaaattagccaggtgttgtggcacatgcctataatcccagctacttgggaggctgaggcaggagaattacttgaacccaggaagtggaggttgcaatgagtcgagattgcaccgctgcactccagcctgggcaacagagtgagaccttgtctcaaaaacaaaaaaaaaattatctctcactttcccctaagaactgattgagtgatatttatacataatgtttgtttgtaaaatgagagttgaaggtaataaattcaataatttggggttttttttgttgatagtaaccagttttcctttcttatgtatagcatatcctgctcctctaacaagcatcagaggccgaaaacctctttttggagaaataggacacactattatgaacttacttgttgtgagtaattgaactattttattaggtatttttatactgttactttaaaactgtatttagcaaagtttatacatttatattttcctactttaatttgccatatttggtataatgaccattcatttacaataaatcctaattattttaacattagtgctcagtttttgacgaattgctttttagaacgtactatctcctcatgtacgtgtacctgattctaagtgccttttgattcattctcctgcagttcttggatatttaggtaatgtaagaactctatacagacctcttaaagttgttgaaacttttgtaaatgtattagtaaagtcagtcagtcttgtgattttgagcaaattatggccttagttttctcatttataataggaagtgttggattagatgatatctaaagttcccttccacctatactttttgtaattttgtgtttccctgttaccatagaaaaatgtttcagtggactcacttttatttatccatgcctagtttgaagaccttttctattttggaagttctgtaactagaaagttaccctaaatactacaaagtttttcctgagaatgatattctttattactgctgtggagaaggatttcttaaagaaggatttaatggatagaaaaatactcatggttagtagtttatggtaatgcaattattctatgtaggaccttcgaaattaccagtataccttgcataatatagatcaactgttgattcatatggaaatgggaaaaagctgcataaaaataccacggaaaaagtacagtgatgtaagtataattgttttattcaaatgacaattattgaacattagagttcccttagaattgtgtcacattaaattttttgttttgaattagactatctaatgtattatggcaacaaacattgtttttgaaatgatagaatttgtttactgtaaataatctgtttgatcatatttcttttttttcgtactgttttattgaggtgattactgttcaactgaagtgcttttattttaaaacatttgtttccatcacattcccagggagctgtccagaccgaagcttgataattatgaagctggccagaaacgtggctcttagaataggcatataatattaaaagtgtttctaaataaatgttgttgtttttgtttttttccaggtaatgaaagtactaaattcttccaatgagcatgtcattagcattggagcaagtttcagtacagaagcagattctcatctagtctgtatacagaatgatggaatttatgaaacacaggccaacagtgccactggccatcctagaaaaggtgagcatcttggttcctagtgctaatttacaaaaccacctcaattaatagaattcctttcaaaggggaaatatatgtatatttacttatttgctgaattgttggtgataaaacaatatgttttgaaatttcagctacacaacagattttaaaattgcttctaatttttgtttttctcttgggctactttaggcttacagacttggaagactgttttccttttgacatctttaggtttagtatatcccgtagggtgagagtctttctttgagtaatttctttctgaaataaggtatttcttttcacatttgttcaccctctgctccaactcctcttagttggtggagcacagggtgataaggataagattgatttataaaacgtaacaaacagcatctatgaatgacattactctcagctctggctgaatggcttcagtgattgctatgattaccaaacccttgcagtagaaggcctaacaaattgaaagttaaatggaagcatttcataaaattaatatattattataggataccatacttaaaatagtccaacattctggctgccaataaaattttttcctctgcttataaaagtaatatatacttatttgtagtaagcttggaaaatacattttgaaaagtagtaaaagaggccaggcacagtggctcacgcctgtaatcccagaactttgggaggctgaggtgagcggatcacaaggtcaagaattgagaccatactggctaatatggtgaaaccccgtctctattaaaaatacaaaaaattagccgggtgtggtggcgggcgcctgtagtcccagctacttgggaggctgaggcgggagaatggcgtgaacccgggaggcggagcttgcagtgagcccagatcgtgccactgcactcccgcctgagcgacagagaaacagagcgagactacgtctaaaaaaaaaaaaaaaaaaaaaggtggtaaaagggaaaagtgccaagatatggtcactattgacattttactgtatttccttcttatattaatgtatatgttaaatagatgattttatactggatatttacacttttatattatactttatcacttaacatgatattggcatttttgccactaaaatttaacaatttttaatatttatttgttgaataggtatatttttatgtggtaaaattaaaaagttattaatatttatagtgaaaaatctcctttcctcccttgaccacccagccatcctcttactctccctacaggcaaccaaaccaatgttatcagttcttatatatcctttcagagacatttttgctttaatatatattcaagaaacacacacacatatctacctctttcttccacttttatagacaagtcataatatttgctccattctataccttgttttttttgttgttgttaacacactttggagattattctatgtttgtgtataaggagcttttatattctacagaactttacattttatatgttgtacatcatttaactgtcccttattgatgggcataatttgttaccaatccttaggggctgtttataaaaatgctacagtgaatagttttgtatacatgccgttttgtacacatttgaacctatctgtaagataaattcccaaaagtggaattggtgtgtcataggatacatttacttgtaattttaatagaaaaatgccaagttagggctccataaaaactgttctgatttgtggtgtcaccagtagtgaatgtttgatttcctacaccctcactaatataggcacaaacatttaaaacagtacaatactccatcaattattaataaaaacattaaattattttattatttacttatttgagacagaatctcgctctgtcgcccaggctggagtgcagtggcgcgatcttggctcactggaacctccacctcctgagttccagcaattctgcctcagcctcctgagtggccaggattataggcgcctgccaccacacctggctaatttttgtatttttagtagagacgaggtttcaccatgttggccaggctagtctcaaactcttgacctcaggtgatctgcccttttcggcctcccaaagtgctgggattacaggcatgagccaccgcgcccagccgcattaaattattttaatgtaatattttatctcttttttttgtctttttaattagttttctagtttaagttgtgtgggtataacatttattgagtacttatatgcatatccacattctgcatttaacaaatgtgtaacataaaaatgagcagtttaaaacaaataattgttgtatttcttgatcagtgacaggtgcaagttttgtggtattcaatggagctctaaaaacatcttcaggatttcttgctaagtccagcatagttgaaggtatgaatttcatttttaatggtgttttaatgtagagttatttttcctaacctttgaaaaatatatttgatatttacacaagaacatatgtaagttataaagcacagtaccacaaacttacatgaaatcatcaaccagcacaagaagtagaagacttatctctctcttctgcgtctccccaggaattagtgagtagactgaatatggtgtttatcattctcttgcttgttttttactttgtatatacatctgcctaaacaacatattgtttatgcttatttaggagataaataaaagtgaaatcattcttcacatagttatatggaactccctattttcatacaacatgagtttctaaactttatgcatgttgtttcttacaactatagcttattcattttaaacgctattaaatattttgtgaatgtatgacaatgtattcatctcctgatcatgaacttctgggttgtatctattctaagaatatattctagagtttctgtaaaatatatatgcaagagtggaatttatgggctgatagattagtaaatgttcactttacaaagtattgctaagttgctttccaaattggttgtaccgatttactttaccatgaatatataaaatttatgattggtctacattttctccaaacatgatattatcagactgcttaatttgtgtcaatcctgtaggtatctctgaatatagtcataattagcatatccctaattaataagcagagcatcctattacatatttattggacatgcatgttgcctcttctgtgaaatgtctgcccatatcttttgcgcttttttctattggattgtgcgtctttttctgactgacttgtagttacataattttatgtattttatattcctcctctcccgtttttagtgtcttttaaatagaagttctcattttaatacagtataatttatgactcttatggctaatgttttttatttaagaaatctatcatacagtttcgaaagatattctcctatgttgtcttcgagatttaaagttttgcctttcacacttaagtccctaatttatctggaatttaattttatgtgctgtgtgaggtagagaaatccagtgactttttttgtcatttgaataggagttgatccagcatcagatattgaattttccctttgccctggtaattgttaatgctatctctgtcacatagcatgttttatttgcacaagaatccatttctgagctatgttcttagcttttgttttgttttagtcagtttgcttaactctgtaccgattccatactattttattatcattgtaaacattttcacttttactgtgaaaaagtcaagcatgtataaaagcaaaaaaggataatatgataaacattaatgaaatcatcacccacctttgactattatcaatttatagccaatcctactttatccatactccttctactctcctctcattgtattatttttactatatcatttcattcacaaatactatatttttaaaagaaaaagtatttttttagaaacataaccacaaaactacagattaggcattccaaatccaaaaatctgaaatctgaaatgcttcaaaatcctaaactctttgagcgccgacatgacactctatagaagtgctcattagagcatttcagatttcacctttcaatttcagatgctcagctgctaagtatataatgcaaatattccaaaatccaaaaaaagtctgaaatctgaaacacttctggccctatgcgcttcagataagggacacctgtattatcacacataaatattttatcaataattcctgtatatccaatcagtagtcagtcacattacccccattgtctcacttcttaaaatatttgttcaaatcagtatccaaataagatccagtcactgcaaataattatgtctactcttttaattatgaatattttcagttctttttgtgattacttcatcttaatcagtttgggctgccataacaaaatacaacagattgagtagcgtaaaaagcataaatgtattttctcacaattctagaggctagaagtccaagatcaaggtgccaacagggttggtttctggtaaggcttgtctccttggcttgtggccttttctctgtgtgactctcagagagagctccagtatctcttcttcttcttctaagaacaccagtcctaggctgggtgtggtgggtcacacctgtaatcccagctcttagggaggctgaggcaggtggatcatttgaggtcaggagtttgagcctggccaacatggtgaaacctcatctctactaaaaatacaaaaagttggtcaggcgtggtggcgggcgcctgtaatcccagctactcgggaggctgagtcaagagaatggtgtgaacccaggaggtggaggttgcagtgagctgagattgcaccattgcactccagcctgggtgagagagactgtctcaaaaaacaaaacaaaacaaaaaaaaaacaccagtcctttcagattaaggcctcacctttatgacttcatttagctttaattaactccttaaaggcccaactccaaatacagttacatttcagggttagggcttcaacatacgaattctggggaaacacaattctgtccatacatttggattttctaattatttttaaatcaattatggtaatatgtggctttctaagtgtatgagtccattttcacactgctataaagaactgcctgagactgggtaatttataaaagacagaggtttaattgactcacagttcagcgtggctggggaggcttcaggaaacttatacagtcatggtggaaggtgaaggggaagcaaggcaccttcttcacaaggcagcaggaaggagaagtgctgagttaagggggaagagccccttataaaaccatcagatcttgtgagaactcacttgctatcattagaacagcatgggggaaactgcccccatgatccatttacctccacctggtctctcccttgacatgcagggattatagggattatggggattacaattcaaaatgagatttgggtggggacacaaagcctaactatatcattcctcccctggcccctcccaaatctcacgtcctcacatttcaagacacaaacatgcctttgcaacagtctcccaaagtcttaacacattccagcattaacccaaaagtccaagtccaaagtctcatctgagacaaggcaagtcccttctgcctatgagcttgtaaaatcaagagcaagttagttacttcctagatacatttggggtacaggcgttgggtaaatacacccgttccaaatgtgagaaattggccaaactgaaggggctacaggccccatgcaagtctgaaatccagcagggcagtcaaatcttatacctctgaaatgatctcctttgactccatgtctcacatccaggtcatgctgatgtaaaaggtgggcttctacagccatgggcagctccagccctgtagctttgcagggtacagcctctcccagctgctttcatgtgctggcattgtctggcacttttccaagcacacagtgcaagctgttggtggatctaccattctggggtctggaggatggtgaccctcttctcacagctccactaggcagtgccccagtggggactctttgtggggacatttcccttctgcactgccctagcagaggttctccatgagggttccacccctgcagcaaacttctgcctggacatccaggcatttccgtacatcctctgaaatctaggtggaggttcccaaaccacaattcttgacttctgtacacctgtaggcgcaacaccacctgtaagccaccaaagcttggggcatgcaccctttgaagcaatggcctgagctatattttggcccctttagccacgagtgggacactgggcaccaagtcctgagactacacaaggcagcaagaccctgtacctggcccacaaaaccatttttacctcccaggcctccaggcctgtaatgggagggactgttgtgaaggtctctggtatgccctagagacattttccccattgtcttggggattaatgtttggcttctcattacttaatgcaaatttctgcagccagcttgaatttctcctcagaaaatgggtttttctttatcgcgttatcaggctgcaaattttccaaacttttatgctctgcttcccttttaaacataagttccagttccaaagtatctctttgtgaatgcataaaactgaatgctttttagagcccccaaatcacctcttgaatgctttgctgcttagaaatttcttccgccagataccctaaattatctctctcaacttcaaagttcctcagatctctagggcaggggcaaaattctgccagtctctttgccaaagcatagcaacagtcacctttattctagttcccaacaagttcctcatctccatctgagatcacctcagcctggacttcattgtccatatcactatcagcattttggtcaaagccattcaacaagtctctaggaagtttcaaactttcccacatcttcctctcttcttctgagccctccaaactgttccaccctctgcctgttaccaagttccaaagtcacttccacattttaagtatctttatagcaacaccccactctctggggtgtcaatttactgtattagtctgttctcatgctgctataaggacatacccgagactgggtaatttataaaggaaagaggtttaattgactcacagttcagcacagcctcaggaaacttatgatcatggcagaaggtgaagggcaagcaaagcaccttcttcacaaggcggcaggaagaagtgctgagctaagggggaagagccccttataaaaccatcagatcttgcaagaactgtctcattatcagaagaacagcatggagggaaactgcccccatgattcagttacttccacctggtctctcccttgacacgtgaggattatggggattacaattcatgatgagatttgggtggggacacaaagcctaaccatatcactaagaatttatcaatttcatttatgttatctaatttgttggcataacattgttcatagtattcccttataatcctttatttctgtgaggttggtagtaatgtcccctcatgaattgctgattttagtaatttgaatcttcttttttcttggttactcttgtaaagttttgtcaattatattttgtttctctgttccttccctactgtgtttttttgtgttagatattttctagtgtaccattttaattcacttgtcacttcttttaatatgtatttttttagttatttcttagttgttgccatagacattacagttaataccaaaatgtttaacaatataattcagataaataccaatctaatttccatagtatataaaaactttactcctgtttatcgtttcctctctactcctttgtgtcattattgccatacaaattacatgtttatacattatgtgcccatcaacactgatttataattattgatttatgcagatgttttttaaatgagaagaggaaagagttacaacccaaaatacatttatgttcttatatattaacctatgtagttaccttacctattctcttattcatgtgcattcaagttacagtctagcatccttttatttaagtgtgagggacttcctttagtatttcttgtacttgaagtgtgccagcaacatattttctctgtttttgtttatctgggaatgtgctaatttctccttcatttttgaaggagagttttgctggacataaactttctggttaacaatatttttcatttagcactttgaatatgtcattccactgtcttctggcctccatggtttctttttttttccttttctttgttttttttttttttttttttttttgagacaggatttagctttgtcaccctggctggagtgcagtggcataatcacagctcactacagccttgactcttgggttcaaacgaccctcccatctcagcctcctgagtagctggaactacagacatgtaccaccaggtttggctaattttttttctattttttgtagagacagggtctcactgtgttgcccaggctggtctgaaactcctgggctcaagcattcctcctgcctcgccctcccaaagtgttttaattataggcatgagccactgtgcctggcctctacatagtttctgattaagaagtcagcagttaattttatttgaaatcctttgtatgtgatgatttgctttattgctgctttcatgacactctttgtcattcacagtttgactatgatgtgtttaggggtggatccctttgagtttatagtatacttggaattctctgtgattcttagatgttcagattagtgtttttcattatgcatatattggtattctttttttttttttgagatggagtttcccagttattgcccaagcttgagtgcaatggcgtgatcctgacttactgcaacctccacctcctgggttcaagagattctcttgcctcagcttcctgttagctgggattacaggcacccaccaccacgcccagctaattttttgtacttttagtagagacagggtttcaccatgttggccaggctggtctcgaactcctgaactcatgggatccacctgcctcaacctcccaaagtgctggggttacaggcatgagccactctgcccatccacatatgttggtattcttgatgatatacccacacgtctctgagggtctgttcatttttcttcttttttctttctgttcatcagactgggtagtcttagttggtctgttttcaaattcacaaattcttctgcctagtcaaatctgttgttgagctccactagtgaagttttcattttaattgtaattttgaactccagaatttgtatttttttcttacaattttgtaatttctatcatttcattgatattctctgtttggttagacatcattctcatactttgattctttagacatagttcctttagttctgtgaacatatttaaaataattgatttataccctttgtctagtaagtgtaatgtctttgtttccttagggacagtccctgttacttgcttttcccttcatatacaggccatattttcctatttctttggataaaagggtttcctataaagctgtgtaactgagatactgtggaggatgacattagtgaaagttgcgacactgaaaacctcaaaaaatactctgccccatataaggaatgaggaaactggcaaagaatcagaagcaactctttcagaactctggaaattagccaaaagtttatagcaattgggtatggtttattaaagaaaaatgactgaatcttgataagaatagcaagctgttattttaacttgccctatacctatcctctcatctccagcacagcagaagccttgaaaaccagcaggcttatagccagtggtgggggcagtaaggggttggagctccttcaaaaacttactatcagacagttgtcattatttgacttctcaggtggttccctggaagaccctacttacaaggctgttttacttttcctgactctaagcttacccagtgggaaaaatcttttctcagggagtgtttgtcgaaatggaatgattatgcatacagcaagtatttaaccagcctctagctatggaatacaattgaggcaaacaacaggcaaatctaaaggttaaaaggaaaagctggggaatgctttgtcggtaaggggtcacatgcaagttgcaaatacaaggatgtacaaatgcccaggaaagacctgggaaggtcctatgtgtccacctcagattgaccttgagcctctgcacaagcaggaagtgatagccaagatagaggtgtccactgcctgacttgaatgttgaaggcatgcccgaacaagcacataaagcttccagcaaagactaggatagttattagtttcaggcatttaaggatatctcagttcaataattagacagctaataagctaactcagcagagactttagtgactacatatgtatgacaaagaatgcagattttacagaattagttcaaaaaagccacataacaacaaacagcaacaaaaacaaactctgtgaagaagacaaaatctgatttccagagttgcctcattaattatttaaaatgtctcattttcaacataaaattgccagacatgcaaagaaacaggaaaatgtggtctatacctgaagggaaaagcaagtaacaggaactgtccctaaggaaacaaagacattacacttacaagacaaagggtataaatcaattatttaaaatatgttcagagaactaaaggaaactatgtctaaagaaccaaaggaaagcatgagaatgatgtccaaccaaacagaatatcagtgaagcaatagaaatgatcaaattataagaaaaaaatatatataaattctggagttcaaaattacaacaattaaaatgaaaacttcatggtggcatgcacctgtaccccaagctactcaggaggttgatggcacccatatgctttattcttcttttcagtagtgccatggccagtgtaagtcctttgattttttcatgttcgttttaggatcaacttgtcaggtttacaaaaggtccatgggaatttttatctggggttgcattaaatcattagcttaattttgagaaaattggcacattttccattttcagtgttcctattcatatagtacaccctcacttattttaaatctacagttatgtgttgcttagtgatggggatacattctgagaaatgtttcattaggcaatcttgtcattgtgcaaacttcatagagtgcacttacacaaacctaaatagtatagcctagtgcatacctaggctatatggtatagccaattgctcctagtctgtaaacctgtacagcatgttaccattctgaatatggtagacagttataatatgatggcatttgtgtatctaagtatatctaaacacagaaaacgcacagtaaaaaatactgtactataatcttatgggactgctgttgtatatgtgatccctcattgactgaaatgttgttttgtggtacatgactttatgatttttggtttaggccttgtatatattttcttgatttattcctttaccttatagattttattgccgatgtaaatggtatcttattaaattaaaattgtaatctgtttctggtatatagaaatacatttatctctgcattttaaaacttacatccagccacattatatactcttatttataataatttatctgtcgattcttttagacttttctgtgtagctgaaatagtgtaattttgcttttttctttgcaattcttatgctttttatttatttattttggttactggctgggactcctaatataatagaagcaataatcataagcacacccatctggatccatgtttatcaattaataccttttaagaagtgaacttttatgatttatttttatgtgccatatctgtcattctgataatggaatttgagatatccatatatttttcttcttatttcttttctttctctcttttttttttttttttgagactcattctcacccagggtctcattctcacccaggcgggagtgcagtggcatgatcatggctcactgcagcctcaacctccaaggctcaggcagtcctcccatctcagcctcctgagtagctaggactacaggcacacaccaccacacctggctatttttttgttgttttcttgtagagacaaggtctcactatgttgcccaggctggggcttgaacttctgggctcaagtgatcctccttcctcagcctctgagtagttgggactacaagcacatgccaccatgcttggctaattaaaaaaaaaaaattgtaaagatgaggtcttcctatattgcccaggctggtctcaatcttctggactcaagtgatcctccctcctcagcctccccaaagtactgggattacatgtgtgagccactgctcctggcatcagtctgtttttgagataccatcttcatcttcagtttttgtcagcttaattatgtgtgcctagattccagtctcttcttctaggactctgtcactgtatgtgtgtgtgtgagtgtgtgtacacaaatatatgtgcatgtgtgtgttagattgttttgtgtcaccccatagattcttgatgctctgctcattttttcttcaatgttttttctttgtgttcttcagattggatacttttcactgatttttctttatgttctccaattattttttttttgccatctttagtctactattaagtctctcctttgggctttcagttttagttagattgtacttttctgttccagaatttccttttgtttctttttccagtttgtatttctctcaagatttattatatgtttatttagcccatatttgctttttattctttgaatgcgtttcctttatgtctttgaatatacatacatatatacatatatatgtgtgtatatatatgtgtgtgtgtgtatatatacgtgtgtgtgtgtgtgtgtgtgtgtgtgtgtgtgtgtattttttttttttttttttgagacagagtctcaccctttcacccaggctggagtgcagtggcgcaatctcggctcactggaagctccacctcctgggttcacgccattctcctgcctcagcctcccgagtagctgggactacaggcacctaccaccacacctggctaatttttcgtatttttagtagagacagggtttcaccatgttagccaggatggtctcgatctcctgacctcgttatcctcccgcctaggcctcccaaagtgctgggattacaggcatgagccaccgcacccagactctttgaatatatttattatagctgttttaaaatttttatatgcttaattggccatcttgaagttggcttcatttgccgaaggggtcacattttctcatttctgtctagtaatttctattattttttttgagacaggatctcgctctgttgcccaggctggagtgcagtggtacagtcatagctcactgcagccttgaactcctgggctaagtgatcctcctgcatcagcctcttgagtaggtgggactgcaggtgcacaccaccacacctggctaatttttaaactttttgtagagatgaggtttcactgtgttgtccaggctggtcttgaactcctggccttaagatatcctccctccttgtcttccctaagcactgggattacagttgtgagccaccacacctggcctgtctagtaatttttggttgtatatttgtcattgttatatgtagggagaccccctgaaactattgctacagaataaaagatgaaatgctcctgattattgtaaatacaaaattgcatgcaggactgtgtaaagacaatgccaagttggactaccagaatgagccaacagcacgtgatgtgcttccccctgcagagagcctatgaatggacgtgcagtcagggaggtttcacatcaccaagattcctatcccagaaaagcagatgttcatagctctgggaatggaatgtgacccttgtggagagcctataaacggatgcatggggggtgcctgtccatatggataagatagggctataaacgtcctaatcttgccacggctcttttaggcctctttagggttaaggcatactcccttctgagaatttctggtctaaccggttgtctagcttcacgtcctgtttctatggattgtttgtaaccagcttttgctgcaactgttactgctgattaatatcttgctaatcacaggttatggaaagactgtgcttctgttttaaggctctgttagaaattactgatgcacacactatattgtaaattcttatctctgtatactgtacttctgcatacagatgttatgttaaagaattacttcatccccatgtgaccatctcacctcataatcaaatgaccctaaatccctcactaagctacccctgccctcactaaacttaataataaatgctggtatatccagtgcatcgttggcaccacgggaccagaaggcggtgaccccccggacccagcattcactatcttttgtgtgtctattatttctcaacctgctgatctgcctaggaacaaagagagcgccccgttgcattgtgggctgctggccagatcccgcaatagttatatgctttagaaactttagattctaagtacattttgctgaagaaggtttgtttatgttttagtaggcagtttcatggttgatcaccttgacattgtgtagacttgatttttcactttcttaagatggatttgtagaaatcctaaggtgtttaccggtccacactaatttgacagtactcagtcttcaaatctattttgcctatagattttgtaagggcttcgttttggcttttctacaatgcttgttaatgaggtgttaataaagtctcttcactttggttggtccacatgaccaaattccccaacattatttgacttctattacctctgttctgttccccatgctgtaacactgtgctatgtttaagcctcatctagtctcactctgttattgtgtccccagttctagtccaaagacttcaaagtcttccatgcagttttctagtgcccccctcttaagtgtcctgactgcagattctaggcttcaccaaactctttatctcttgagttctcagccaatagggccattgtagacttagtgggtcaccttgaagaaattatccccaggcagagagctcagggcagagagtaagggctctctgcctgggaataatttcctcatggtgacccactaagcttacctgagttctctgcctggagataaccatgggcttaacctcttcagtttccctctagggatctcagtattgcactgcctattgtccagaacctgaaaacagttatctcatacattttgtctagtcttagggtggttgtcatgacagggctatctggtaccagttatttcatcatagccagaagcagaaattctctttgttttaaccttaaaaaaaaaattcttaactttgcaaaatacttgtcttatttcctagtggaaaacaaccattaagatgattagcaaatgatttaaaacttgtatcttacacagaacatattttgatagcaaattttatggcttagatatacacattggtatttggcaaaagaaatgtgaaacttagtctcatttctagatggcttaatggtacaaataactccagagaccatgaatggcttgcggctagctttacgagaacagaaagactttaaaattacatgtgggaaagttgatgcagtagacctgagagaatacgtggatatctgctgggtagatgctgaagaaaaaggaaacaaagggtaggaatttttttattctaaaatataattgatttgaaggaaagtgcaggattaaaatatcctattaataaaattaaatattttatgaacgaatatatacttataccatcaatttaaatgcctttactcaaattaatgaatgcaatctttttcaaacatgtgcctaactagcctcataagtggtggtgtggtttttgggccaggatggtccatttgagaggggcttgatgatgacacatctgttgtgtagcagtgtgggcttgatgccagggctgaaaaggcaagacactttttctttcagatggtacctatttttgtcacataagtaaaagattccctttggatgatatatactgtattattttgattcactataaatacaaacaactggatttaataatatttacattagaggccttacagattattactgccactccttcctctcttcagttacccattttctttctttttttgagattggctaaggggtctggagcaaagaaggaaaaagagggctgaaggattccaaaatagagtttttgaattcatgaggcagcttttctattagactatctaaggtattttaaacttgaggtctgaatttggcatatgaaaaaggagatacaatttattgatgaacaaaaaagattactacacaatcaagaaatcttggtaaatgaatgtgaactacagatttagttattttgtatataattgacatatcttcttttatattttttccctcattccatttgttcaaatctaataattcatttcaaaaacacattggtgctaataattctattgtattatgttttatttcatagagttatcagttcagtggatggaatatcattacaaggatttccaagtgaaaaaataaaactggaagcagattttgaaaccgatgagaagattgtaaaatgtaccgaggtaactaagaaagaaggtccctttacatgctgtgtttcaatatgatttttgttctttggagattgtgcatactcaacctctaaatatttatgcatagcttattatactttttatgctacactttgagacatacgcatttccaccccagaattttatacaccagaattggatttccatagggttagttcaggctatcaaatggtggtactgcctgccagctgtgttggcagcattgccatctttgtactgtaatatgttacttgaccatattttcattttcctcagattttatgaaaaataagatattgtcattaatttataatcagcattcacatatgaaagttactttttcatgttttagtttttttttaaattagaggatatgaaactacagactcccaagtccttagtctacctccttattccccctcatatttatttcttatgcattctttgtgattttattacatgtacaaaatagaacctgtagagaatgtagacacaatgttttatcttaacttcatatagatgttctttacaggatagactcatactgatttaataagcctttccttgctacaaattaaccttaggcaaaaattgctgagacatttccatatttaccataactttttgttttatgtttttacttatagtacagatcaagctatcgatacagaattctcacaactaatgcttttcatggtacttacattggaatttaattaaacttgaaagcagcaattgttgcattttaaagttacttttaatcatgacttgtttcctaattaaatacatttcaggtgttctactttctaaaggaccaggatttatctattttatcaacttcttatcagtttgcaaaagaaatagccatggcttgtagtgctgcgctgtgccctcacctgaaaactctaaaaagtaatgggatgaataaaattggactcagagtttccattgacactgatatggtgaggcatgtttttgtgatgtatttttgaaatgaatgtattgcatattaacaagtttttcttcaaccttttattttgggatgaaagggaacgaaaatttgttgagcatcaaatgtgtgctacacacttcacatatattatctgtattagtctccacaacaggggtcagcaaactgtttttgcaaaaggacagacagtaactattttggacattgtaggcagtatggtttctttcacaactactcaacactaccattatattgggaaagcagccattcacagtatgtaaacaaattaagtgtggctatgttccagtgaaattttgtttacccagtggggccaagtttggcctgcaggccatagtttgatgaacccttctccatgactactctgccttataggtaggtttttaaatttacttatctgactaaattctatatgtacatgatttaaaatcttaaaagtctaaaagcgtatatataacaggaccacctcgctgaatatttgcggagagcagcattcacaatgtattctgtgtaactggtggactctggagataataactccagactacaatgtaaatggttcccagtagagttgtataaggcaacagccttggaaatatctttcctactgttgacatccaacccatcagttcaccttcatacttttctttatcctccctctccggccaagcaatcagtgttactcatttcttacgtattctttgtgattttatgcatctacaagcaaataagtgtgtgtcctcctttttcatcttccctcttttacacattttttaccttgcttctttaatatatcttaaagatattaatactagcagacattcttttttaacagcggcatagtagttgattatataaatgtaccataatttatctaactaattattcatgcatatttgatatatgttgatagacattcaggttgtccacaatattttgcttttacataagcgtaagtatatctataagaaaaattctgagtagaattgccaggcctgagtatatacgcaatagatattaccatattatcccaaatagaggttatgtcaatttatatttatttcttccagcaatttgtgagagctctttccctcacatcctttttttgagacagtctcactctgccacccaggctggagtgcagtggcacgattttggctcactgcagcctctgccccctgggttcaagcaattctccttcctcagcctcccgagtagctgggactacaggcatgtgccaccacaccttgctaatatttgtatttttagcagacacagggtttcaccatgttggctggaccggtcttgaactcttgacctcatgtgatctgtggcctcccaaagtgctgggattataggtgtgagccaccgcacctggcctcccccatatccttatcaaagaagtatataatcaaacttttgaacttggacaatttgataggtgaaaaataataccacattattattaatattattattacttgttaaatagatggggtttcactctgtttcccaggttggtcttgaactcctgggctcaagcagttctcctgccttggcctcccaaagtgttgagattgtaggcatgagccaccacgcctggccccagtattattttaatttgtatttctcttaacaaggagtgatgatcatcttgcatgtaaaaacaatttgtttttctttgaactgaaagttctctttctgacatccaggtaactttccaacatccaatatagattttcaaatcagagaattcattagaatggttaagctaaacgtgggtgagttcatatgctgagggtttgcttttctccagccaggatatattttactcatagttcttactggaaaaggggttttgtttttatctcactattaaaagtcctcttttcaaggaagcactcactatttgttattggagtaagcactgtaaatttttttagccaattgtattaaaatgtaatttgcaccaatgttagagtctaatattaaatattattgcaacaacaaatttgaaatatttcaagtagatttttttaataccatggggtttttaatttaagtaatgtcggcagttattcaaagcctcatccctctaatttgtttatgtgttcatttagaggaaacgtaaagtatgacatagtggcaattttatctttatgatatatgaggaggaacaattataatttatgtagtagacagataaaagatacaggagaatgtagaatttttttataaatatatcaaatattttatttaacatgcttgaactgtattttaaaatatttcacttattttatattcacattccgagttaaacaagattgctcattttcttatcaagaattttttttttttctaggttgaatttcaggcaggatctgaaggccaacttctgcctcagcattatctaaatgatcttgatagtgctctgatacctgtgatccatggtgggacctccaactctagtttaccattagaaatagaattagtgtttttcattatagaacatcttttttagtgaaagaatgtgccatattacatattgcaacctaatttgttaaaactaactccagcactaaagctgaaatgccacaaacactaaaagtataaatatgtctgatttttgaaacacataagctttgctctttaggcaggaatgatcttttcaaatcattagcacaatatttaaatatctaaaaatttaagagatccatactttctgtagctttacaattaatttaagtactaaaaagacaaggatttcttttaagaaatttatagcatttactgtgttatttaaatgctaagccaaagtatctgcacttaggtatacctctttatgccaataatgattttaatgaaggctcttttcagatgtaaccttatgaaggaaatatctgctttgtgtatatgccagttagaatactggtttctaaagtctgtcaaattgtatttcagtggcacaaaaaccagttttgaggtcttagacttataattctttgaataaaactgataacttatttgtataattggagtggagacctacctccataattagataaactctttttggattataatcagaattttgccttttttcttctcaaattattacatatgtatgtattatatatccacatatatagttttccctgattaaatggatattaaaataattgcgggtgcttcaggactttttgcttctatatttaagtatattgtttttatagcaagaacatattctgaatgttttataaatctttaataatttatatgtaggtaatatttttgtatcacaatgcattatttttttcctcctttccttccaaactataccactgtatttaccacttctaagagtgactgacgacgggccagatgacccttgaagtagtcattatgtagcaataaatgaagcctgaaacaggtttttttacttccactttaatccttagaaatttcttggcaacttcgcatattttcattgacaccagtgtataagtataaatttaaatgaactaattacttttgcatattttaaattctttatatggtagttattttttataacaggatattaacataagttaaatcctatgtatttgaaattgttacagagctttcctctttacttcaaacagcaaaaaagtggggggcatattgtagtcctgtcatttaagttatgtaaaaaatttaatcattattttgatgctttaaacattctcatgtgtaatatatgtttttgtatcaaaaacactcatatatttcaagaaaaagaaattatgttaaatagccctgttttaagaaaaatatttatgaagcatctcaacttgaagatcaagtcaaagttataactcaggatctgaggtctcaagctaggagagactgagaattttaatcagtttgggcatatagtttggactgaatcacatctgtagtacttagccaaagacaatttggaggagaatatcagccttctggaagtagctacttcctgaacaatgtaaagtgtcgcagatattcaataaaatggcaacctgttataatttgtgaaatttattgaaatggtgtaagatgaaaacaattgcatatcaaacccaatttatgttttctaaatatagtgtatgtattctgccatgtaagtaattgaacagtcttaaaataaccaaatggtagagggctgttccatgatgggacagctttggatttgttttcataaaatctctatattcaataaaaattggaattatgtgcctgaagtttggaggcacattttgaagtattctttgtagacatatagtatgtttctgaatgtgtttgttacttatttggtcattggtacttaatttgaaattttaattttttaagagaagaaatagaatggttctttgtactcagtctgcaatgatctatttttggcttatgtcttttaatactactctctttctctgaattttgaaatatgaagtaaaatctagcccatttgttttatgcagctattcaacaaactttgtgtgttcgtatacttgctacatgcagagcactttaccaggtttctaagcaaaaatttctaaaaatgattaattgttctgacagaattaggcgtagttctttatcaacatttatggattccatgccacaagtagtatgcgcttaagtgcagagcatgccaagagaaagagtaggatttggccctgtaggagcaaagattcaattgtgggaaactacttgtttctgaaaattgcatgctaggatatttacatcatgttcctgttgaaaacaattcctgattaaaatacaagaataatcttaaaacatcaaagagattttccagacaataaggaatgccaagtccaaaagtaaagagaataagagaagcaagcatgtacccttactctgacaaccttatgagtgagggggacagaaattaaagttcagggcccatataaggtgatgaacctaacaggagaccctccacacaataggctgagactcccaaatactttcacctttaggatgataatgaatcagaggtggaagaaccaatgtaaaagaacaggcaagtttagaattgccccagtgatctaaaga

SEQ ID NO: 37 - DNA, 14366 bp, Homo sapiens
tcatgcacaaaacaatcagtaaaactttatgattcagaaacaaatccatatccttttcgatgtcaggaggttacatattaaccactacatcaaattagctcagaagctacattgaagccgaactacatcaacgtttgggtgtatgagcagatctggttataggttacagaggtatccttcaatcagacgttatcttatgtgtaggaaaaggcaaggactattattgcttatcttttaaggagtagagtgactcaggcaagagagatgggaggccgtgtgctcaatcttgttttgtctttgaagcatctttctggagaactgcaggtcatcacagcaggggctttgtgaaagtatgctagcaagccgaaatgagcaagcaaggcttcttacatttgctacattgtctcacaatataacacgttaggtaaagggttggatgtgatcagtaattgcagagaaatggagccaagcccatttcactgactgtgcaggggttgatgtggattctctgctaagactgcataaccaatggaagccatggagtgtgccgggtgtgtcacagcctcacttaggcacagcgtttccttgtctttgttccagggaggatggtggattttccaggctacaatctgtctggtgcagtcgcctccttcctattcatcctgctgacaatgaagcagtcaggtaggattcccttctccctttactgtatagtctaatgtcccagtgagctagtctgggtccaaaggtcgagaacaacatctaagagtgtaagtctggggccaagccacctgtatccaaaaaggaactcctcacttttgaggagctcctccactcccaggagctcctccactcctagctgagtcacctttggaaagttacttgagcacctcataccttagttctttcatctttttaatgagaataacagcagtaactacatctcagaggccagcacaggctttaggattaaatgagacattaaaagcacttgaatcagtggttgcaccacgttaaattattaattcactctagtactttggggtcaagaaatgcagctgcttcttatcataaattaagctgcaattaaaaaaaatacttggaaataagaaattagaagaaagggactttggaaatctcactagctgaattttgacgtcaaaatgttgcaccttgaaaaataattatttaaaaattcagtgtcaaaaaaaaaaaatcagtgtcagaaggagatgtcagagccctaaggaaaatgcagcatggcgaagtgggaaaaaacacgacacagagcatcagagggcgcaggctctgcctcggcaccgcagagctggtgtgtctgcctcggtgccgcagagctggtgtgtctgccttggcgctgcagagctggtgtgatgtgatgaagctgctggcttctctgtgcttgtgctgcagctccctaccctgtaacagtcaatctgatggaatgtcttcagttctagcttcatatttagacttcatcaatgaagaatacaagcagatctccacttaggctctttagccaccttttgagcagcatctatttgatacccagcagcagctaagtagggtgaggttcttcctagcaggattggatctgcacagagaaagagcaaatggccccggagcatttagaatgagaaagaacatatcatacatgacataaaatgatcaaacataataacatacataactgttaaacatctcttcaatttgcagataacaaggaagagatcagacatgtcttagaatttgtttggaagacccaaaaatctctagacaaaccagtgtccttaatccagcacaaaatgtccttgtgaaaactgcattgtacatagtcccagtaattggcctcctgccaactccagacgggaaaaaaacaaacaaaaaaaaaacaaaaaaaaaacagtttttatatctaagagaagaggaatcctgaaaggctaaaaaaagctaataaatggatttattatctaaacttcaggaaaataaaatgttaataacaagaataaggtttccaatttaaaaagtcaatttacatgagaataaatgactcaaggaataaataatttacttgagaataaaaacaacccaggtatgctggtattaatatcttgaagatgaagaaattaggacttcaaatctcaaaatcttaccaagagtaatagatttgccaccgaatcacatagctggtaggtgacagacagcaacctcacccacatttttgaactgcatttgttttcagtacacaaaattgactctgtaacaaacagatgtgcaaatcatcatgctggatttctctaaaacattaaacatatatctctccctcttctagttgcctccattttgacaggctggacaccccaaagcatgcatatgattttctgattggcatttcctcgttcctctttttcacttattttatagaagactttagagtcattggccctgctcatcctatcctggccggggttggggaagatgccctgttaacctgccagctactccccaagaggaccacaatgcacgtggaggtgaggtggtaccgctcagagcccagcacacctgtgtttgtgcacagggatggagtggaggtgactgagatgcagatggaggagtacagaggctgggtagagtggatagagaatggcattgcaaagggaaatgtggcactgaagatacacaacatccagccctccgacaatggacaatactggtgccatttccaggatgggaactactgtggagaaacaagcttgctgctcaaagtagcaggtgaatatctggggaaagacacagggtctcaagaggcagagatatattaatttgtggtaagctttgtgacagttgaggaaatccttttgaatcatcaaggtaattcctaatgcttagtcctctaccctgattgatttaaaaataagtggttctggagtcttcaagcttagtgttaaaatattttcccaaatttaatttgcacagttttgactgttcttgaggattatttggaatccatgacatgcagtctttagcaattttgctgagacacacatttgtgctacctaaggctggtgcgcaagagcaaaccaattgctgcatgaatgagcccagctgacgtccggcatctgtatctcagggcattggtttttctctacccaatcccatctatgcagaaactgagacgtgaaaatgttctttccttgtgaaatgccctcagttagaaagctatcaacaagactgaaaaggctaagaatgtcgtgctttggagattgttatatactagtgttcaatgaattggggactcacagatgcttttggacacaccctctgtgaatgggaaggttcttcatattgctgttgtattagctaagcaggaaggagtagggaagaaggggacaactgaagaatggatctgtcttatgaaaagtaaactatcatatgattccctgacagggctaacttctccatgctctaaagagaaaatcaagtaaatccaattactaaggcaaatggggaaaatagttctctggagatgttaacgtctccagctgatactgcttccttctttacttccctgggaggctgtttcctaatacctttttttttcttaacatccattactgttactgtgttcaaggtgattcaaaatggatggaggaatacatatatttctgacatggggggacagggaacgtactgatgtatttcaatatcaggaacatttacaaataagtcacacattttctaagggtccaagggaagggagtggatctctcttttaccagcaagtgattaagacagaattcccatttatggaaaatatagtccccttagtttgggtgtgggagtttcacgttaaatagagaaaaaaaattcatgatttcataaactgttgtaaactaggatttctcaaaaccatcttacccattgaatagaatatttagctacaaataacgcctcgtggagattcgcatttcacatgctcccgtttatccacttgcttccgaagatcacagccaccagcaaaagatgcaggaagaacaggcccctggggagtgatttctgactttgtgttaaatcttcaatcaaattggagttcaagacatcatctaaaataccagacaatgtgcccaatacagataattttaagatgaaaaaggcagagttcatggcacagaggaattaatgaataaattacagctcatctctgtttgcagtgctagaggcgttgcaaaatgtcatgatgtcccccttctccgattcccctttctggatctggagaaaagtactggtcagatgctaaaatgtaaagacccagactggggaacaaataaagtgtatctgaactcacatttgaatggggagactgaggtcgactttctgctcctcagactcctgaactccggccacctccctgtgagcaacgtcactgggatctcagcctctgtgatttctgcctctgtgggctctgggtgtcagagctgtggcttccctctgcaggtctggggtctgcccctagcatccacatggagggacctggggagagtggagtccagcttgtgtgcactgcaaggggctggttcccagagccccaggtgtattgggaagacatccggggagagaagctgctggccgtgtctgagcatcgcatccaagataaagatggcctgttctatgcggaagccaccctggtggtcaggaacgcctctgcagagtctgtgtcctgcttggtccacaaccccgtcctcactgaggagaaggggtcggtcatcagcctcccaggtcagtgctctgcctctaggacccacatgctcagatcagcaggagaggtcccagggactgcaccatagcacctcgtatttttatcaagagacattatctatcatatagcaatatgtattgaaagccataaaacatttatgactggaaatatacgcactacattttacttgaatagctgttatggcgcctgcgttatttttgagttctacctttccttcttctgcattgattgtttttactcacaagtattcattgcattgtaaagaaaataaagctatatttcttcaactgaaatgttttcctatgctgtcttgtgctgattacttctagaaatctatcatatgaagataatcagagatgtagacaactatttgcataatagaatattaattatggccttatttataaatagcagcaaaaacaaccaaccccccaatacaacagtacagtgtggaatcttgtcttactatacattatagcattaataaaaagatatttttaaataattttaatggttgaaaaaaatcctcatgatgcactattcaatgataaacatgacatctacctataaattgacatttccaatcacataaaagttactggccttaaataacttataactgcactaaaactttcaggataccctccacatttggatataagtatacagttattcatataaatggatagattaaaaaaactttaaagttaatgttacattttaattttaaatgaagctgattgtatattacatataattcgtctctctactttgtaatttaggtgatactgtttatgtccatataattttgtactttctgtgtatctataaaaggaacatatgttattttcatgctgatagctaagtatttatgctgtaaatatcagaagaaaccaacagaatcatggggagatagaagtgacagcatttttgttgtgcagagaaaaggaaaaaaagctgtatcattgggtaatctgtgggaaagaatcagtatttttctgcatttcatttttttaatgaattgagcttccctatataatgtataaattgctttcttttttaaaaaatagtttctctcctttcccttacaccaaattccttaatatgttattcttgttctttttccagagaaactccagactgagctgggtaagtacgaggtgctggcacacacctgtggagggagcctctgccctccccagcagagggaggggagctaccacgagaccatgtgacccagaggaaaaactgaggcacgattttaccaggtcctatgttcattaaataccagaggagaccagcaaagtaatggcctcattcaaggaggttgcagctgtgttacctgacactttgggggctcatggagattccagtgagcatcagatggacacctataggaagcatggcatcatctctgttctatgtgttgaggggaaagggagctgcctcagaatgtgtgggggatgacagcagacagctggccggggcctggaggccctttgaaaacatttcaagtgtgaacaagggcagcatcattatgacaacctgggttgcacccagcacctccctgctcaactctgctatggggtcctgcacctgctcctcaccccagtacacccctaagctaatcactattgggagggagctgttactttctgagtgcaacctgggatactgtgagtgtagcaatttttttttttttttttttttttttttttttttttttgagacggagtcttgctctgtcgcccaggctggagtgcagtggcgcgatcttggctcactgcaagctccgcctcccaggttcaggccattctcctgcctcagcctcccaagtagctgggactacaggcaaccgccaccacgcccggctaattttttgtatttttagtagagacgagatttcaccgtgttagccaggatggtctcgatctcctgatctcgtgatccccccacctcagcctcccaaagtgctgggattacaggcgtgagccaccacgccgggcattttttttttttttgagacggagtctcgctctgttgcccaagctggagtgcaatggcgccatcttggctcactgcaacctccatctcctggattcaagctattctcctgcttcagcctcctgagtaactgggactacaggcatgcgccaccacacccagctaattttttttttttttttttagtagagacggggtttcaccatgttggccaggatggtctcgatctcctgacctcatgatccgccggccttggcctcccaaaggtgctgggattacaggcatgagccactgcacccagcctaatttttgttttttaaatctcggagttggactgagggtattattttgctgcacctgagataagtggtttaaaacataaccagccgatggctgagcccctttgagtttcccctttacctccttactagctccctcctttttatggcctcttctcccagcccaaggcaaccagcctgcctccctgcctaggtgcatagaacgtggatcccttatgtgctctttccatcaattccttgctctccatcaagtcacctgctccaggaatgtgtatccatgtgtgtgctttaggtgagcttaagcacacctttcagcccacaaaagagtttttgaggaaaatcagggtaacaaacacaacccaatctctaccagagtctactatggcaccttcaaccccattaggccataaacataaagggaagggtccctggaaggcgcaaagtaactccacaatctgaggagagacacacacctgtgtatcttacccttctgagatcaggaagtaaagccagtgtttggggcaggttgacacaagtctgtctctcaagaaggttttaggagaagagtcactcctctgagttctctgagacccactggagacccagcacacacaatacgaccccatgtcctgttgttcctaagtcatggtaacctccggggccacaattaaccaacacggaaagatggagcttccctttgcttcctgtcaggtgggagaggagggctctgggcacggaagctttgcaggtgagctctaatgatgggacacccagctctctatggaagtcctaagactgaaatcactgcttgtagtcttacaaataatgtttttcatttataaaaataatagtttttaaaaatattaattgtatgccaggcacgatgctgaatatgttatgggaattatttcattttttcttacaataattataaagtttaattgctttatcctcatattacagctaagaaacaatcttagagacatacatggtttgccaaaaatcaggaagaaatggtgatgtttaccttctaatctacatctatctaacttaacagtgcaagtccttaattacttatgtgtgactttgtcagctcattcatctctatttttctcatctttaaagtgaacaggttgaatttaatctctaatgtagtgtccagttctaagagattagatataacttagcatatttgagaaatgagatagtgcattaattgaatatgctgattgaaagaggattatgtggtatgatgatgagattatcaggtttcaaggaatcagtgtataattcagtgtacttcacgctccagaagggaattaatttttcagtggatattcagaaggcattcagaacatacaaacaataaccaaaacaaaacaaagcaatacatttcagcacaaaattgtctggaaggctgtgtacaaaaccgtatagaaaaaggaggttaactactgcatgttcacacttataagggggagctgattggtgagaacacatggatgcatggcagggaacaacacacactggacacctgttgggggatgggggagggagagcatcaggaagaacagctaatggatgctgggcttaacacctgggtgatgggatgacctgtgcagtaagccaccatggcacatgtttacctatgtaacaaacctgcacatcctgcacatgtaccccggaacttaaaattgaaagaaaaaaaaagtgggttaggcatagtggctcccaaggagcttgtattctagtagaacatcaattattaacaaacagggctgcatgatttttttagcactttaaactttagttttacttggattctggacaaaaggagttttgtctgtatctgtaatgcatcaaattaattgaatctccatacttacattttgcttccttcagtctccattgaagtcaattttagctcttaattacctatgtcaggcagggcaagccagtttaagatctaatatgtgcacaggtcacacacggacagggaataaaatcctcatatggataaaggagatgaggaaacagtctgttttattaagtaatttaccgtaagccatgtggatgcagaaacagccccaaactaatccctagtccattttttctgattcttgtcttcagactttaatagatacataggagaggaaaataatattgttttaggtaaaattacaggacaaagcaaacaaaatgctggaaataactgggagtcaactgttacctggaatggaaggtaataatctgaaaattcaaattgtgttgacagggactttcctctctacaaaggtagctggcagttttcggccaatgacataatgggatgttaacgcctttggccagtgactctatgcagagaaccaacaattttatgcttgtgtttctattataaatgatcacaccttatgcaaaaccattcttatcatttaacagaaaaggacgacacttaatttagaatagagaaaaaatggcacgggcagggcctgatgagaatggaaaatgtaatatagcttgggcccaggaaagccctcagagaacatctttccccactttgcacagtgagagaattagaccccttttttacattcatcattgtttcacaatttgtactttgccgacttccccaattattgatcttaaaatgttaattttaattttcaaaattatttgaggacattcaactggtgtgtgtctataactccacctatgtggagcattggggaaataaaatatagcggctggaccagacttacaaggtactataaagtccacctagaggaaagcttcttcaaatatcattaccaaaagtccacatgagacatgtttttaaacccctccctattaccacgtcagagggtggggatggctccaacgccttcaagtctcacaggtctgtgcacctctgctcacgctgcagggtcttccaggcacttaatgcaaactattttgttcaactctgaaacattatgattttggtagttgtatagcaaatttacagtttaagaaactgaggcattaagaagtagtttaagacagattaagaagtagtttaaaatcatacagaattgaagtgttagaagaaaaactttagacagactaaatttagcagagtctaactgagaaaaggatgactcataaacaagccatccctcagaatcagaacggtttcagagaattcaaagcagcaatttggtcagacagcatttatggacagaaaatggaaatgaggtacagaaaacagaagtgaggtacagagacagctctattggttgcagcctggcgtttgccgatttgaacagggtttcaacagttggctgcctgcaactaacagaagtgcagcagctgctactcagctatttattacaaaagtgtactcctaagttagccttagctcctaagttaggcttattcataaaataattttgcaattaaaactctcagaataaaatgagcaatttataaatttggccccaggatgcctctgtacctgagtgcttatgtaacaaactgcaacctaagttaggctttcagtagttgacgtactaagttaaattgcagtttgttacataaggagtcaggtacagaggcatctggggccaaatttataaactgttcactttattctgggtgttttttgtttgtttgtttttaaagtctcgctttgtcacccagcctggagtgcagtggcatgatctcagctcactgcaacctctgcctcccgggttcgagcaatttttccacctcagcctcctgagtagctgggattacaggcacccaccatcatgcccgactaatttttgtatttctgtagagacggggtttcaccatgttggccaggctggtcttgaactcctgacctctggtgatccacccgcttcggcctcccaaagtgctgggattatagacttgagccaccacacccagcctatctgggagttttaattgcaaaattattttattattggtctgtaaactgaaaaaaatacaggtagaagcaggtagggattcaattactgttttactcagactgacacacatcatggaatgattcctccttaaagaagagcaacctctattctgagtccatgaaacccccacctcacctaaggatgaccctgagcctcacagcaaccctgggatgctcatggtttctaaactccaatggagctgttcttagagatgacattattggttccattttgattctttcattgtgttttgtccactctatttaacagcttctttaaaagtgaatggaccttcccagcccatcctcgtcagagtgggagaagatatacagctaacctgttacctgtcccccaaggcgaatgcacagagcatggaggtgaggtgggaccgatcccaccgttaccctgctgtgcatgtgtatatggatggggaccatgtggctggagagcagatggcagagtacagagggaggactgtactggtgagtgacgccattgacgagggcagactgaccctgcagatactcagtgccagaccttcggacgacgggcagtaccgctgcctttttgaaaaagatgatgtctaccaggaggccagtttggatctgaaggtggtaagtaagaattctagatagatattttgtattcaatacctgctcctgccactttaatatgctagttcctggacaatttctctgacatttgaaattttcttaatgcttattcatcatcaaatttatatcaaatcctccagtgtgtgaaactgtcatagttacttaaaatccacaaactcaaatggatgaaatttaattatttgggcatataacttgtatcttttccagtatcttcaaaaattgaccatatctttaaggaaatctgagtatcttactacatattttacaaaaggctcattgtttcacagtgtgttattagaattctgagaaatgcaataaaattctagaaactgtaatcatctgaagactaaactggatccactgtgtaaaccaaaattataaatattgacagttttggcagggacaggggagaaaagatgaaatcactccctgcagcatcatttcccactgtccgtgtgtgtgagaattgaaacgtccaaggttagcagatgccattgagtacatataggcccaagtcttggatatgctacgtgtttctcccacggattttgattctaaattaataaacacgtttagccatgggagcgcatgttgagaagtttcatgagcctcgtattttctgccattggacgtagatatttataaggtttcgatttttgagaatatcctcctactccgtatgttaatcctgtccatgtgacccatgccctggccgaagttattttgttctcagggacagaataaatgttggatttgaacatttaccttacctcttaatcatcccagaatgatttaggaatacaaagaataaaaataagcaaacaaacaaaataagaaaatgctccagccagcctcatccctaagtggagtgcaatcccccttaagcttttctcccttccccaagccctccacatccccttctttcctcccagtgaaattgctgcccactcatccacttgaaaggaccccaggctttggttgctttctctgccccaggtctgggttcttccccactgatcactgtggaggggcaagaagatggagaaatgcagccgatgtgctcttcagatgggtggttcccacagccccacgtgccatggagggacatggaaggaaagacgataccatcatcttcccaggccctgactcaaggcagccacgggctgttccacgtgcagacattgctaagggtcacaaacatctccgctgtggacgtcacttgttccatcagcatcccctttttgggcgaggagaaaatcgcaactttttctctctcaggttggtgattccttatgttccttcaggtttggaaaataaatatgaagaccaactcagacttactcattgtattgctcttcttcctttgtgatttttatttgctgatctctgacgaggtctcctgctatcctctgcaaagctggttttcaggacacccagggattctactcctctgagtttctctctgacaccctcaactagcgccctgcaattatttttatcattggatacacactaaattctcgtaattgaccctgttttcactctctctctttaaattctcttcttctgatgtgaaaacaattaaattacagaactttgtgttttccccctcatggaggattttcttctggattagaaactgatttttattaataccatcttcatggttgcggcttgagtaattttatcctttcctcctcaagtcattccagtgattgtgtgatatagttggaagagagaagggaaaacttgtctgtgcatgtgtacatttctgagacgagcaaacatgaaatacttgcattctctcctctgcatctccagagcagggaggagcaggccaactgcttcctgggaggccaaattctctcccttctctccagcctagaagctgctcagatgaaaagtacaatcttaatattgtcccagtttcacagtttcaagggattcttgggtttccattttagagtccaggatgacgtttttgtggaaaacactgcttgtttggggattgcttcttgctgtggctgtaggcctgcccaggaagaggagctgaaaagaggtaagtcagggaaacagaaacagcggagcacactgcagtgggaaccgtactgcgtacttccccgagcctcccttttcacaagtcacctatgggaggcagtcagtgaatatccagtaactaaggaaacatgagaaacaggaaagcccagggcttatcatgcaatccaggctcagtgatgcatgaggtcagtgtttccacttgtaatagaagcaaaatgattaaaagataatgatttgatttcctgctgcccattccccagtgatctggttagggaagaagaagaaaaaagtgagtagtacagccatccttgttttcaaggctgagagctgaggttcactgagatttgttggcgtgaacaatttcctatgatctttaaaaatgtggtgacctacttgttggtgatttctgtgttgctggtgacttctcatgtgttagggaggctgttttgtgtgctctagaaagtgcttccactttaaatttcttatgtccgtgaaacacttgtcttcctgtttggctgttaatagaatgaaattatattgattaattatcagaatggattctctttctttacagtgaatgtgacattggcttcaaacacag

SEQ ID NO: 38 - DNA, 44130 bp, Homo sapiens
gggtattcttctttgtaaccccactctctggaggtactaagcatagagtaagttattcaatgtggctgaacaaatatagcctatgcagaatgccgctaatgcctcaatattttctccagtttttccagggcattcttaatttgagactcatggccaatcaataaaccctgatttttggttcagaaaatgtgctttctctagacacttgaagagttggggaaagttataaccatgaggaggaagcatggggtctctggaggtgacagtcctccagaaaaggagttcttgaaaagaacagggatctcttgctcttgtgtgtgtgtgcacttgcatcccccaggtcctctctgaggacccagttaggtttttttttttttggttggtgacatctggcagcgttcagcctctcctcccagctaatgctcaagaaaagctaagctgaccctgtgtcactaaattgtcaccagctgtgtctaactttaaaaatctgtgattaatatgagagctgaatgttgcttattaaccaaacacagcttattaatcattcacaggtatgtggtaatgcttccaaagacatgccctggcagctaagaatgtacgggcttttacaaagagatcaacaatagaacaggagaaattctaccagatgcaaaaagaaaagggcaagggagaatataaacgtttgcctaattcactgatctgcttaaactgccttttaatgcttagaaaatagaaaggatggcacgatcctttgatgaaaggaggctgtttatgtcagaagaagtccagacctctcacagtgacgaggggagaataaaaaagctgcaacatcaggcgggtagtcccagtttcctccctcagttccgtgccaacaacctaagggtgctcgtctggcagggtctgtcctttttcacgtctttggagctcatcagtttttgggttcagctctctggaggtggtgtcctctctaaaatctagaatgtaggcaccacctgggaccccttctgccaaaggagatacaagcagagctggaggtcaacaaaccatggtgctcccaccctcttcaatcttacttcaggaagtgactgtggagaccaaaggcaggctccttggtggccctatccaagctgagctgggagtgaacatctgctggaatcccttggtagaaggctgggggtgctgtaccaagagattgtcttttcagaaatgtggtgagcaattatgcaagattcgagagctcagcagaggaaaaggggctcctagctgggaaggaagaaggaccccagagctttgaaacacacatttacatgcatagacacatgcacacacacacccccatgtattcataccgtgtgtgtatgaatgtacagatgatccctcactcatgatttgacttaacaatttcttgactttatgatggcacaaaggcaatatgtatttgtagaaaccatacttcaacgaacaacacaaccattcgattttcactttcggtatggtagccaataaattacataagatgattttgctcaactgtaggctaatctaagtgttctgagcatgtttaaggtaggcgaggctaagctatgatgttcagtaggtcaggtgtatgaagtgcatttttgacatacggtattttcaacttatgatgggcttataggaacaaaatcccattatcagttgaggagcatctgtttgtggagaaataatcacaatcctggaacaactcatctgaccaaattttctaatgttttatatctcagattacagtagaaacatgattattgtagaaaaaaatcaggaaatacagaaaaatataaagaaaaaaataatcccatcacagaaagaaacattaaacattttgcatctggcactctggtctttgaacttggcagatttagtgctctttattttgtttttcaatattggaatcacactcaatatactgttttatttacgttgacaatgcactgctaacctactttaagttatgaacatatcgtggacatttccccacatttccacgatttttattgttggtataatattcatgttaggatgtgcccaaccagatactttaactgcaatcaagataaacccatttactcagaatcttggctcacagcgtaagtaaaaatgactggatctctagttgggccctataatgcgaaaagtctcactacaccaggacggtatgttactggagaatggagcaggcgcagaacagggcagcctgctttctgtctctcctgtgtttctgggaagagaagctattttctcccctcctcctctgctgtgattagatttattttctaatctctctctgttcatttgtggtttattgtttgccagaagtccccatgtctgttgttttgtcattctgaagcggcttcgttgtctggggtaaatacccagggttcgttacctggcgccaagaaaatttaggacagggacacaaaggaggcctttaggagcgcaggtttaataggcagaagaaagagaaaggagaacagctttctctctagcgagagagcggggcttctgaaagggaaagacttgctggggcggaattctccaaatttttaggcaggtttgaagaggcggtgtctgatttacatagggcccacagatcagttcgattaggtgtgatgtttacatagcaggaggaaggctggctacctcaccctcatcttactatgcaaaagagctttccacttgacccgcgccatgttgtctgttccttaatgtacacgtggctggcactgagaaaaggaagatgggctgggcgcggtggctcacacctgtaatctcagcactttgggaggccgaagcaggcggatcacgaggtcaggagttcaagaccagcctgaccaacatggtgaagccccgtctctactaaaatacaaaattaactgggcacggtggtgcattcctgtaatcccagctacttgggaggctgaggcaggagaatcgcttgaacctgggaggtggaggttgcaatgagcctccaccatgccattgcactccagcctgggcgacagagcgagactccgtctcaaacaacagcaacaacaacaaaaacaaactaactaaccaaaaaaaaaaaaaaaaaaaaaaaaaaaaggaagagaagatggaaccgccattttgaacatgcctagtcccaggtagtattcctctgctggcatctatgtctgtagcttgatttcacaggctgctctttgttagaaaggaaaagtatttggggctggttttcattaaaaggaaaaccttaccgaggacttctgtaccctcactatctgccgaagtaatttatttttaacttgtgtattctctgagtggttcagagaatcttaataaaagaggaggaggtagggtgaccctcagcacttaggaaaatacggacacctcattctggagtgcctgaagtcagcctgcaggaactccctgtgtctgagaggcagccctcgctcttcctgagctagtggcagaggaaagcggctggaacagcagggtcctgtagtgtgggtgggagctttaactcacgctccttcctatctgttcccacttaaaaccatctgggctgtgaggaggtaattttctagcccttcaacttgtgtgaccacacacattctttaaagagatgtttactagcttcacaggattaaaaacaaattctcctttaaaaagttcaaaacaaacaaacaaaaaaaaaacctctcagttttctctgtgttccctcttctgactctccataagaaaggtatttgtggcctctctgaaccatgactcagattttcacttgagttttgacttttctcttttccctacaacttcctgttgctgctgtgaaatgctgttgcctgagagggcttttcttttttcccctgatttaactccaaggtgatttatgggtccctgtctcgatctatgtctcagtagagatgaggggaaaaagagacggccaagaccttcacggcctcctcattctcctgaccttagagtccagctcacacagaggctggctaggagtggaagtgccacttctccatgagggcggtccccattcctgacagtgccaactgaggattgtacatattttaggcagaaaagcacaggacctttgttttttagaattccactctgatttttcttcttattttttccctgtgctagtgacccaggaataaagctagggaaagagaaaatgtgatcattccggcctggggaaggtgaaaggacaggatagcaacaaataacagagaatgatgcataacagcatattgatagtcttcacagtttgcagagcattttcatatccattatctcattagctcctcacagccgcctgcggggaaatgcaccacaggcattgtgcttatcctggtctgcagactaggagctgcaggtctgcgatggatgctgtgagatgtcacccagacccctcgtcagggcggagaaactcactccccagctgtccagtgcccactgcaaacagccacaattgagtccctcactgggaattcccccgctgaaggaagctgcctttgccaaggttatctccctccctgggccctgccttgattccaggcaactctacggggccatcccagctccagaacaccctgtaggatcagctgagaaccctaggatcagctgagaaccttgtagcagctgcatcagaggtcagcttctctctctgcccaattttcctttcctccctctctccctccgggggttgctcttgagagctctccctgttaaacttcttgcatgcaagtccccatctgaaagtcttccagggaacctcactgtattggcccattcaggctgccataacaaagtacaacagactggtggcttaaacgatataaattcattgtctcacaattctggaggccagaagtcagagatcacaatgtgctctgggactctcttcttgagttgcagatggctgttttctttgtgtcttcacgtggtctttgctctgtgcacatctgtgttttcaatcttcttataaggataccagtcatattagattacagccctctctaacaacctcattttaacttaattacctctttaaagactccatatccaaatacaattatgttctgaggtacccggggttcgaggtatgagttttgggtggccacaatttagttcatgatacctacctaacacaatgttgaagagattgagtgacatgccccaaataaagcagtgtccccttatttaacaacttataaaatatcttacagccctgtggttctccctgatcttctgccacttataccttatgtaatggaatgggaaggtatcactgccaggaaatcaagaattaggatccggagtttctgtgctctgttcgctactacacgtgatctaccacaattgggaatctaactcattctgttctgctaaattgttgccagtgctcacaaacgcacattgtagtggacagtataataatattattgttaactgatgttattaatgaccacaaaatgacaaaattaaggacacacaaaaaaatcacctggagtatactcttggtgaagcaataacacagggtacaaaagaatacagaatacacagatctgggtctctgggataaagactagatcctaaaaattgtaactgatcagaaaaatacagagctgtatggtcccaagtgggaaatatttcatacaatggtgatctgacaagcttcaaatttttttcatgtgtaatgatgtgattgttaaacactagatacgcattgctggaaatttgattttccttgtctcctgacaaatccacacggatgaaacgctagctggaggagattggggagagaaaagaatatgattttaaatcaaaagtagttttgccttgaaaacagcatgctgtaaacttgactttagattctcactccactccttcctatattgtgtgctatgcaagtgcttttgtttcattgtgcctcatttttttctcagctataaaatggagataacaattttttcgttgtagaattattgtgaagattaaacagatttattttttatttttattttattatttttttatttttttgagatggagtctcgctctgttgcccaggccagagtgcagtggcgcaatctcggctcactgcaagctctgcctcccgggttcacgccattctcctgcctcagcctgccgagtagctgggactacaggcacctgccactatgcccagctaatttttgtatttttagtagagatggggtttcaccatgttaaacaggatggtctcgatctcctgaccttgtgatcctcccgcctcggcctccgaaagtgctgggattacaggcttgagccactgcgcccggcccagatttattttttaaatgtaaagcaccctgcacagtgctggtgtatagcaggaactccacaagtgttagtttctggctcattagagagaaaacctctcctgctaatcaatgcattgctacagctgccagcaaaatgagagaaagaccttcaatgccacccccaaatctatcccttatgcataagggaggtggatattctctttcaacttcaggattgctggtggaggcctctgcatcactgcactgagccccgcaataatcctgctagctgatctttcagggtccccagaacaccggaagttctaaagggttaatgcatgcaatggataaggaagagaataaaccaagtaagagaaagagagagagagcactatacagatgggtctttcttttttcttttaacttttattttcggttcaggagtatatgtataagtttgttacctaggtaaacttgtgtcatgggggtttgctgtacagattatttcatcacccaagtactaagcctagtacccaaaagttatttcttctgatcctcgccttcctgccacactccaccctcaaataggtcccaatgtctgttgctcccctctttgtgtccgtgtgttctcatcatttagctcctccttataagtgagaacatgaggtatttggttttctgtttctgcgtgaatttactaaggatagtggcccccagctccattcatatttctgcaaagcacatgatctggttttttttaaggcagcatagtattccatggtatatatgtatcacattttctttatctgatctgccactgatgggcatttaggttgattccatgtctttgctattatgaatagtgctgcaataaacatatgtgtgcatgtgtctttatagtagaagaatttatattcctttgggtatatacccagtaatgagattgctgggtcgaatggtagttttgtttttagctctttaaggaactgccatactgctttccacaatggttgaactaatttacactcccactaacagtgtataagaattcccttttctccacaaccacaccagcatctgttattttttgactttttaatagtagctattttgactggtgtgagatagtatctcgttgtggttttgattttcatttctctaatgatcagtgatattgagctttttttatacacttgttggccacatgtatgtcttcttttgaaaagtgtctgttcatgtcctttgcccactttttaatggggttgcttttttcttgtaaatttaaattccttatagatgctgaatattagatctttatcagatgtatagtttgcaaatattttctcccatactgtagatcattgttgtttactctgttggtagtttcttttgctgtgcagaagctcttaagtttcattagatcccagctgataaacaacttcagcaaagtttcatgatataaaatcaatgtacaaaaatcactggcatttctatacatcagcaacagccaagctgagagccaaatcaggaatgcaatttcattcacaattgccacaaaagaataaaacacctaggaatacagctaaccagggaggtgaaagatctctacaatgagaattacaaaacactgctcaaaggaatcagagatgacacaaacaaatggaaaaacattccatgctcatggataggaagaatcaatatcattaaaatggccatactgtccaaagcaatttacagagtcagtgctattcctatcaaactatcaatgatattcttcacagaactggaaagaaaaactattttaaaatttatatggaatcaaaaaagagcctacatagccaaggcaattgtatgcaaaaagaacaaagctggaagcatcacgtcaaactatactacagggctacagtaaccacagccacctggtactggtacaaagagacacacagaccaatgaaacaggataaagagcccagaaataagcctgcacgcctataaccatctgatcttcgacaaaactgacaaaaaccagcaatggggaaaggactccttattcaataaatggtgctgggataactcgctagccatatgtagaagactacatatacaccatatacaaaaatcaactcaagatgaattaaaaacttaaatgtaaaacccaaaattataaaaaccctggaagacaacctaggcaataccattctgtacataggaactagcaaagatttcatgacaaagacaccaaaaacaacaataacaaaagcaaaaactgacaaatgggatctaattaaatctttttttttctgtttattctgttttcaaatactcattatagaacatttcacccaattcaaaaagatacatagaagagggtgagaagatttaacattttggtgaacatccttccatgtctttctttatgctaaaatacatgagtgtaaacgacttttaaaaaagggttttacactatgtgctagtttgaaaactgcatttttttcaccaataactcatcatacctattcatcatatcaatgaatatagacagacagtctttaatagctgcaaaatatcccattgtatgtttcagaatttatccaatcccatattgctgaatatttaggtactttccatttatttgttgtcaattataataaaatattttgttaaacgactttgtatatgcattttctcaaacttgtccaattgtctttaggataaattcctagactaggattgcttggtcaaaggacactggctccataaaagtgattaacaatttaccttcccagctcaagtgttagggaaatcccaaattccagctgtctcacttcaaattcatgatgataaaatggaaactcaacactggaattctattatacatctctacgtggtttgctttcctactcttttaggataattctaaatcttttcattatgccttaaccctactgcaccactttcccctcttatatgctcagttgatgtcctggtttcattctttaaaaaaaaaagtcatgaagcacaccaccattttctgtacacccctaaatcaacacacccctcccacccccacatacacacacactggaacccattttctctaccttcctccttcactgtggcagagtccacatggctggcactgttcagcatctcacttgagccacatttacgaaacaactcaaggacttctctccttctcaggtactgacacataaaatcaataccaaaactcaacaaagatagactaaaaagaaaaaataggtacagatcaatatcatatcactcatccattctttcagtacacatttattgaacacctactacataccaggcactaagggaagagaatggtgagtgatataaactagatctctatcctggaagtatttataatccagtggtagaaacagatataaactcaccaaaaacaagataagcagattgcttgtgatggatgccagctagaaaagagagactgactggatagacagcaatggggtggattcagagccctagaaaggaaggtcagggaatgatgctccgagaggagatacatgaagaaggcagccatttgaaagttcttcagagaagaagtttccaggcaaaaaaaaaaaaaaaaaagcaagcccagaaatcactctgacgttggaggcaaagccgggaagccagggtgggtggagagcagtgcatgaaaaaggcaggaagggtacaatagtgtgcaataggaagggggctggactttattgcaaattaattgagaacatgttaaagaatatcaagcaacatgcttgaaatttcatttttaaaagacctcttgaggtaaactgtggaaattgaactttacagaaacccaaacaactagttggagaatagcctcactttttatacattaaatcacataaaactccaataatgcaatgatggataaaaaaatccactgtctcacacaaaaaaaacaaaaaacaaaaaacaaacaaaaaaaaaaccacaaagaaaacaaaaccactccaaaggtatatatcatagagtgcaaaaatcccacattcaaagcagaggtgaattacttgtcaggatcccttagtgctgaaactgcatgtggagccctctttctttctttctttcctttctttctttctttggctttattaaagttttttttaaggaaaagaaaaaaaaccagatttatgcttcggaaaaaaattttggcatagattctaaacaaacacactaaagccatattctttaatcttcttagattcataaatgagctatttccttacttaagtacaattaggaatggcttattttctcaattttaagtgagtttctgaaacatatcacatgacacagaggatgggtggaaattagaaactgttgctgctgtgatagttcatgaatcatatgatcttgcttttcctccataatttgctaatagcgtctgaaatctaagaccaccgcaaggaattaacatataattcaatcagagttaaaaggatattacccaagttagcgctgtcggtttccagcatgcaagtggtgacaaattaggaaatcttttttttatttatttatttatttatttatttatttatcattcttttgtatatttaagattgtcctctctaaacatttggatatccatgtaacactgcctttaggataaaaataagatggggagggggtctggagttgtttgcagatattttaacacatgcttgaagtaaatatgtagaaaaataaatgtttttacacatgtataaattattccacccccagagagtcactgctcttaggtagccacaggagatggatcttttgcatgtaaacgcagttggttcccttctatgaaaggctctctggctttctctttgtttccccttcagactttgtgggggccactgtggggacatcttaagtcatgcatttcctaggctaattattccagcgaactaagcctgctgggcattaaggctgtggtttgtgctattactactctaagatcaacgttctctcctatttcattacgttcaaggtcactaaggaaagattttaaacccaaagcggtgcctccagagccctgggggttcagacaaggcattgcttctcctagtatcacctacatcctagcagcctctcattattgcaagttgttttgtggaattctgtaaacgaggctaatttctcacaatgttaataaaacagatatttacctaaccacatttttagagcagaggtgaagggacacaatcggtgtagaaattgttgcaagagatcataaggtcagacatcatataccttccaggcattcctggcgcctttccttcctcctcccgcgtaactcttcccagcacaaaatttccctttctcagatcagaaaggaaaagtacacaccctcttcgcttcctaccccccttctgccttttccccacagctgttcttgttgcattttcatttctctgttctggtccatcgatcctaaaggctttggagtcctgcccacccaaaccgggtatactctcttcatgggttcagaagttctccttcttcctcaactaccagcttcaagttgtcactacttttctcactttccttttttgaaaaccagctttactgtgttcatgatcatttctgagacgtcttattaaaaaaaatagccctccccacacttcctttttttttaaagcttgcattccagctggctaggagaagaaaggtccctgtcgagctgggagtcgaggttttattcatttcccctccattacaggaacgcttctccctcaatcctcactgttagtagaaattctgcttagtttctcaatcaagcctgcatttcactcatctcagtcttctctagcttctctcctcactccccgagcatgctatgtaaagttgtatgtgtcatacttatcccaattattaaagaaaaaggacgcttaactaccatcgattgaattcccagtgtaagtgtcctttcctccctaaaagtaacctcgaattcttctcttaggctgagtgatcctgggagaaatgaaatatgtaacattcttaagtataggcagctacatgcaaacaaccacacacattcttcttcaaatactttggtgagatgattcctattctttaaagaaaggcacttccaaggatacagttatgaacattttgtcttttatgtctttccacagttacaacattttcactaagataagcagcttttcaatgaatttgatcctttcctgaagtaattgttcaaaatgtctctaatcaccaccctaactaggtttcctttggggactggggctagcactgctcatctcagattgtgaacgtctatcctaaacccatgcagcattcttatcctattgtgatgaaatccacagggttcaaaagttaattcttccatgaatgtgtaccaggtgctggggaaggctgggaaggagaggctgggtggtacagatgacagagttcctgagggtctagttgagcaaagatatattgaatacaaaaccaaaaataacagcatgaagtcaatggaataatagtgtgaagtgctcaagggagcccagaagagaaaactgtcccataatggaaagaggagggtaaaaggaagggagtttcacagcagacaaggagaaggggcatttttggctgaggaaacagccttgaaatgtaggctatacttagagaccatttagcagtctggcgtggctaggggggaaatttgataattccatggggaatgagacagacacagaatgtctaccccaaatcctaccatctgggggcctagaatccttctttgcttcatgtcagtaaggccaagaaaagtacttttaaagaagaattttaaaagatttgcatggctagtgaaatctttgggattgtaggaagaaatcacaataataattaaaattattataactattattttgtcaaactccaagtgatttaagacatacatagtattttatagctgaaggaacttcaaagaccatttcatccagcctgcttattttacagatgaggaaattgaggcccagagaaaagttccttgctgcaaatccactgctagttgggaacaaagctaggctggagcacagatctcttgcttcctaagccagatcgcttgccacgaaaatgtgccaatctgtgcacccccactaccgatttgtcctgtttctcagagaagaaaaaacaatggttagagtttaagaggtttccctgaagtcacccaactcctggtggctcagatgggactcaaacccgggatgttggggacatgtagccaacactctcctgtaaacattcttactaaaactaaacccattcacgagggatgaagtgtgagacagaagagtgagtgtggtgattagagccccccaacccacgtatctccagtcatgacctgagtaagaaatacaggggctgaaagaggtctgctttgcctcagctaccaccagcctaaccacgcacggctaagcctcaaggagttctccttcttcactaagggcttagctgcaatgtggtttaaattagacatttcttgcctgagtagaacaaatcacttaggttatacgctgacaaaaaaggaacagtctgcatgcttggaaagcttagggggaattaaattatgtgctgtcacttcagagttgttcctctgtcctgtacaccaccacctctcaattgcctgcaggagctgcagggccttgcgtgcaagctgtgccataacccaaggcttaacataaacttcgggctctcaggtcattgggaaataacaggtatatccggttgtgccttttgtgcttgtctgcacgcaaattaaaagctcgtgctatgctgaactccttggagcctctggttacagagaagggaggatgccttagaatggaattttcacacaattgtcctgtttgtttttccagggaattgggtgatagtgtgtgtttgtaagaagttcacacctctgggaggctgagctcagaaggggcgggatgtggaggtggccatgtgccaggcgaccctctagggagcagggctccaaaggaccccacgtctgaactttgaagggacggtagtgcttacgggggcggcggggaagggcggggtttgcgcagatctcagacttcctggctagtagcaacaatgccaagtgcagagctaggtggggaggggtgcaggaagggatctgaaagcttgggggccatgtactcaggctgtcacctccctaagggaggctcctcacctccctaagttttgtgatgcccccactacagttcagccctgaaccctccagatggctgattggagtaggaatgaagcgtccactccgtcttcatgtttcttcccatgggacacaataatattcccttcgctgtgactacagcctccccccagttaagtaggagaaatctatgcctactgcactccaactgtgagatttcctctggcaggagtttgcctagctggtgcagctgggaagcagcagagagtttttgcagcccggcggaactgaattcaaatttcagctcaaccaacatagtgtgtgtgaccttgattgataattccaactcttcctgccttgctttatttgtctgtaaaaaagggatgagggcaatggttatctcaaagggttggctgtgtgggattaatgaaatgatttctgtcaagtgcttggcacattgcctggctcaaaatgctccatatatggcagttcttacatatatgacagtacattattattgttaccattggtttaattggcagagctgcgatccaaaaatttcagactgtggctcgatcctgggcttcgatttcaggctgtggctaagaagccctcctggcttcacacctaaccaggatccacatgcctcttccactgagctgggctctcccagcttcctgactcaggcactacctcgtctccgggccgcaggggtttgggcatcattctgtctgcctcttcttcctcctccttcctggggctaaggtacatcatctgggcaggtagctgtcttgggaagatgacatctttctagccagacacctggtggtggcaactctgcaatagtttagagggttgcagtggtgtttcaatgcgcccacacttgtctcagggctattctcttaaaatcagtaactgggacattattttttctgaaatccaccgcaccctcacctacttcctacgccaagacaatagcccatttagatttttcttggatgaagagacattcacacacacacacacacacacacacacacacacacacacaaacaaaaaacacacttttttttttttttttgagacggagtctggctctttcgcccaggccggactgcagtggcgctctctcggctcactgcaagctccgcctccggggttcacgccattctcctgcctcagcctcctgagtagctgggattacaggcgcccgccacaacaccaggctaattttttgtattttttagtagagacggggtttcaccgtgttagccaagatggtctcgatctcctgacctcgtgatccacccgcctcggcctcccaaagtgctgggattacaggcgtgagccaccgcgcccggcccaaaaaacacactcttaagtttagacaatggttctcaaagtgtggtccaggcaccccgtcgggatggcccctgagaccctttccaggaaacccacaaggttacagctgtgggaataaaacattatttgcatttctaactctcattctcttacaaatttactggggggtctttctgcagaaacagatgtgagtcacctgctatcttctgttaagtcataaattaaagagatttgtaacaatattttttaaaactgcccactctgactaaatatttgtaattttggaaactagttattttccataaaatgttatttatgttaacatgtattaggtttattatttttaatgaactaacaaatattttataagtttttcagctttaatttctagaattataaatattgatagatacttagctaaacaatagttctttggactctacaatattttttaagactttgaagaggttctgaaaacaaaacatttgagaaacattgagctaagattttggcactggggcctatgaaatcattgcttttgctcacttacttctaaataaaaccatcatttctgaggattggaatagtgtgaattttatggtaatttcaatataatgggtttgagtgtagcagatctagtcatgaagcccatgtggaggctgcatgccaactctctgcatgttccagccactgtgttaaaggaagattttctaagccatcccaagatttgattgtaaattgtggagattaaattgctgggcagataccaaggatattctgcaaggggaggggaggaagagggtgtgagttgcatcaggctctggcaacaagatggctttgcttgttgtggtcttgggctcctggagggagtcagctcacagggcaggagaaggcagtggggtggcccaggtccctaataggcataacagtactagagacctctacagttactgtagttagaggggtggggcttctgtaagacttaggatgatacgcagtgagtcaacaaatgtgtactggtgtggtatagatgggctttggtgcctgcagacctgaattcaaatcctgacccctctcacttgcaacctctgtgacatttggcaaatagtttactgtctctgagccttaatccctttgtatataaagcaggctaaatataccaatatttttaggatgattgggagaaataaatgaaactgtcaatgtaaaaaatagaaaacagtgcctggcacttagggggaaatattagctactttctctgtctccaaacttgttgtgtggtgtgggagactctaagggaacggaggagcttaagccacaggccctggccttatgatgataacatcagagagaatgctcctcacatttagcaggacacagtgctccgactgtggtactcaaaattgttgtggtgtttattccttgttgagtgatatgtgttactcaggaggctgaggcaggaggatcccttgaacccaggagttcaagaccagcctgggcaacatagagagaccctgtctcaaaaaaaaaaaaaaaaaaaaaaaagatacgtgtaagttgctcttcacctctctgatttgctgcaggaagcctcaggtattaggttcagagtccagagtaaatgagggcagaaatggaggttcccaccagccctgagtgccttctgtgcacttgctgtggaagaggattccattttaccccgtagctcccgggattccactggggtgtggctggtaacctgggggctcagggctcagtcacatccttattgcaccagaaagtccctgaaatagtgtaggagaatgaggtgcctgggggcatggctgctggttggaggccacagtgccaccttctcaaggctcagaaactgggaagccttccttccttctgcattcaaacccttaaaatgcacaacccaccccccgtggctgactcagcacaatgggaaaaggaaaaacggaggttagtcagcccaagagtacagaccattgaatctaactttccattttggactggagagcattcgagacaatttcctccctggcctttagtaagggagagctgggagtctcccgttctgccttctggtacaggctccagaagtaggctgtttccctcattgtggctgtcaaatgggctgtatgccccaggtctgaggccacagtacactttgactcagagctgtaatgtaagaaaaaaaggcggtgttttctgggaagctggatagcgttgcgtcatttgtacaaatcaccaccgggaggtcccacgacagcactcccttgagtttcctcccaattgcactgcacagcatggagttttctgaactctcctcagcagggaattgcatgagtgttgtcctggagcctcattgccacagggctacaaagcatccgtaacagtcacagagggactgaccgaaagcatagcttggtggaagaggcctactatggcctcatcaggctcttttgggaacatggcatccccctgcctaaagaactgtctctgtactacctaagggtcctgatgtggagcgcgtctgggtgaggagaaattagatgaggagaaagtgctgcagagctgccatctgggagttggagggaaacacaaattggctattggtgctgagctcttctgccaacagcagatgtttctgtgagatcagccttcttaaggcagcggcaaatggcctcccacagaataatgataacagctaatgatgcctgagcacccaccacatgccaggcacccttctaaaagctttacatgtattagttcattcagtcctcaccacaactctgcataatcggtactggtatcgtctccattttacatctccattcacttaagtgtaagctggacccagagaagcgatttctagcatggaagtcactccggtgtaagtaggagagccagattcagattcagtctggctctggagtgatgctagcagccactcaatgtgctgcctgagaaacgcaaggaggaagtgactggtgccactttgggctgttaggaatttgcaggtgggtaacggcacgccaccctgagagctgtcacgctgaaccaagtgggccatgtttttattcctgcgaggttcaagtccttgccatgtcttggattttactggacagaagtaaggacttagtaagtagtagtaataatgataatggctaactgttattgggtgctcactctgccatcaactatgctatttgttttcttacaatcaatatctcatttaatcctcaaaaccaccctctgtggttggtatattacctgtcttgtacaagtgaggaaagtcaggctcagaagggttaaataacatggccaaggttacagcttataaataagagagctggtgctcacacccaagagtgcccggtcccagaagccaaactcctaatgattgggtatgctggctgtattgcctttgatatcctctggaggattagacaagcccagaaggcatttgggcctgcgcccacggcctgtaaagaattgccattcatctaagaggggatatggaggtgtgtggagttggctctccaatcctggcttctgtgatgtgttccatagggatgtggaggtccggaatcacccccgtctaatgttttatcagctttcatctggggatttccctcatttgtcaggaagaggagataatctgaacacaggcatatgtattctttaagagaagaaataggtctgaaagacaagtaaaatttttgttttgtttgttttgttccatgttggcaaacctaagtcaaagtaaccatcctttatagaaggaaaagtatttaggtacattctacttggtacaaagccaaggttcatagagatgggaattggcaaacctttttagaagacagtgaggatgtagcatatatgcatatatccctatggctcaagcatttctattgagaatcgatactgggggaacatttgcaaatggattcagaattgcacagaaaagtgaaatcactgcagtggagtctctaataatagagttgagaacaacacaaatgaccatctaagtcgccgttgatggttgaaaaaataatgttggccaggcgcagtggctcacgcctataatcccagcactttggaggctgaggtgggaagatggcttgagtccaggagttcgagacaagcctggacaacatagcaaaaccccacctctaaaaaatactcaaaaattagccaggcatgctgccacgagcctgtggtcccagctacttggaagcctgaggcaggaggattgcttgagcctgggaggtggaggttgcagtgagccaagatcacaccactgcattccagcctgggtgacagagcaagaccctgtctcaataataatagtaatgacaataataatgtcatggtcataccatgcagtagtttaaaatcatgaagtagatctatctatctatctatatgtacaaccgtatgcatgtacataaatagaaggcacatggtacccatggttactctgggaaggggtgggagtgtgagttttctcattttattctcatttttctgcatatttttatatactgattgactctcttgcaacaagaatctatgttactacgtgtgtgtgttttaagaataaatatctggccaaaatagaaaaataatttaatatgcataatattctggatgtataatgatgcaactatataacataaaccgcagtccaaagatttttgcctagaagtagtccagactgggccatgctttccctggatagtcttcctgtcctgtcctagtctgtgctcctgggagtatcaacatggcctctgtaggccagaacaccatcctaaagccacaagatgcatttaatagaaataaatgtaaaatctcacatgtagtatttttttgaaaaatcaataatacaagtacaactgaagactcagccagctaccaagtcctatattaaaggatgaagatttttgcttatcacaatcttagtagaatatagatgttttaatagtgggatgcaaatatattaaaacagggcaaaaactttgtttgcattgaaagtaacactatgtctaatgggaagtaaccacacccccctgggctagacagaatgtcatatttgggatactatgttcagtttcaggcccatactcagatggacatactgaaaaagcacattgtccagaaggcagagataaggaactggggcatttttaattggtggaaggatggctcagaagcagcacaattccatcttcaaacatgtgacagcaaaggagaatgagtcttgctttatgtcactccaaagaatagctctagatttaccagaaggcaagaaagttcactccagaatttttcttaatattgggaagaaccttctagcatctacagctttctaaccaaagcagtccaacaatagaacagacaacagttgagaaatgatcacttcaatagtagaagggaaaaatcctgttgggagtcaatggtcaaaaaagctgacgtataactatccagcctttgtgttctccgttgggatcatgcaggggaggactaaccacttaagttatttaactatcaattattttctcaaaccctggatacacccagagttttcaaccggaattttggtccatttgtggaaagagaaaaaaacctgtgagggaatgcagatctaatgctaaaaactaagaggtgaatggagagagagagagggagagagagagagagggagagagggagagagggagagagggagagagggagagagggagagagagagagagagagagagagagagagagagagagagacagacagacagacagacagacagacagacagacagacagagagagaaagaaagactagaatctggatgctaaccatccaaaaacctggaggctgtaccagtcaacatgtccatggctagatgttgtgatcttagctgagcccaaatgtacattcttttggtggtggggtgttttacttgttgctttatgtattttcttggtaacctggtaaatatttatttttagaaaatgaaaataaaaaggaaaactagtatcctttatctgcctaaaggttttctatggttggtcaaagaattagggaagtaaagtgtttccctattgaccaaagttgtggacagtaggctccctctttcactgttagaaaagttgatttcaggctgggcgcagtggctcatggttgtaatcccagcactttgggaggccgaggcaggtggatcacctgatgtcaggagtttgagaccagcctggccaacatggtgaaaccctgcctttactaaaaatacaaaaattagccaggcatggtggtgcacccctgtagtcccagctactggggaggctgaggcaggtgaatcgcttgaacatggcaggtggaggctacagtgagtcgagatggtgccactgcactccagcctgggcaacagagcaagactctgaaaaaaaaagaaagaagaaggagaaggaaaaggaggagagaaaagtctatttcaggaagtagagtaggtggtagtagaagctcagagaacaaacgtacaaaaacaaccacagaccctggcgtcccttcccttcgtatggaatcatcactgtgccaagtcggtgggagcttcaccccacaaatattaagcagcagaggcacatgctcaaacgttgagcaggagaggtaagtacaccagttgagagcccagacaaagtgactgaccaccgtgactatcttttagccccagggctgggtatttttttctttttctttttcttagttgctgtatctctctgctcccccttcttatttccctcactcttttcccctctgccctgactctttactcttctgtgtgagagagaatgaagagaggaagggagacagcagaacagaaaagggggcacctgagacgagagtggaggtcttgagggaatgagggtgaggaagataggagtggacccagagaaagggaaaatgagagacagaatgagagagaagaaagaaggatgaagcaaggggaaggaaaagggcagaaggaagcaaaccaaaggaaagaactgggaatgatgctgggaaaaaccattaaagcacagcaccatttgctgcatttatgaagcacatagaaccctgagtagattatgccccttaacacaggggcacagtagaactaagggcatgacactgccttatatcatatttcttctgctttcaaaaggaattgaagaaagcctaagataaaagagacaagacacactcaagccattcaaagaacaaggacggcacagaaagtacaggttataatccatagtgctgaggagaaagactgcaattgagcacaaactttttattagtcctgaactccaggagtgacacatcagatgcaggaccctgaacagcagactaatcccactttctttccactgtccttgcttacaagaaaccctcaagagaagctaagaaggcaatgtaagatcaaaatgttgggaagatctttttttatgttcttatatttaacttttaattttgatataattacagaagagtttcaaggaatcacaaagaactcccatttacccagattctccaattaacattgaccacacttactttctcattctcctctctctccctctccttctccccaaacccctctattttttccttgagccatttgagggtaagtggcagacattacacccctttacctctaaatatgcattttggtgaggaactagaatacatgtagctttcactacatgtatttctgtcactttcactaataccagacagagctcatgggcaacgagattggaaggggagcaggagtaggaaacttgttttaagctgcaactacttagcaagtgactatcttttcttagattaatttaggtcaataaaaatagcagaatcttctaaatcaccttctcaccaactttacataggattgagaaaacatcaattgtctacatttgtctacatgaaataatattaatagaaatgaggattggtagccaatacccttggtgctaaccactccaagaaatctagaaagtgcttaatacaaagaaagaatccttgtcagcctgtattgttaggcccctgagcccaagctaagccatcatatcccctgtgacctgcacgcacacatccagatcgccggttcctgccttaactgatgacattccaccacaaaagaagtgaaaatggcctgttcctgccttaactgatgacattgtcttgtgaaattccttctcctggctcatcctggctcaaaagctcccccactgagtaccttgtgactcccactcctgcctgccagagaacaacccccctttttcctttacctacccaaatcatataaaacggccccacctgtctcccttggctgactctctttttggactcagcccgcctgcacccaggtgattaaaagctttattgctcacacaaagcctgtttgatggtctcttcacacggacatgcatgaaatttggtgccatgagtcggatcgggggacctcccttgggagggcaatcccctgtcctcctgttctttgctccatgagaaagatccacctacgacctcaggtcctcagaccgaccagcccaaggaacatctcaccaattttaaatcgggtaagcggcctcttcttactctcttctccaacctctctcactgtccttcaaccactttctcctttccactcttcaatctctcccttctcttaatttcaattcctttcattttctggtagagacaaaggagacacgttttatccgtggacccaaaactccggcgccggtcagggactgggaaggcagccttcccttggtgtttaatcattgcagggactgcaatgattattcacccaggtttcagaggtgtcagaccatgcagggacgcctgccttggtccttcacccttagcggcaagtcctgcttttctggggaaggggcaagtaccccaaccccttctctccgtgtctctaccccttctcctcctttctggggggcaagaaatccccaaccccttctccttcaccctgagcggcaagtcctgcttttctagaggaggggcaagtaccccaacctcgtatctctgcaccccaatcccttatttccgtgccccgacctcttatctctgcgcccaatctcttatttccgcgccccaacctcttatatctctgtgccccaatcccttatttccacaccccaacctctaatctctgtgcccccatcccttatttccgtgccccaacctcttctccgtgccccaacccctttcccgcttttctggaaggtaagaacccccaaaccccttccctccatgtctctactctctcttttctctaagcttgcttccttcactatgggcaactttccaccctccattcctccttcttctcccttagcctgtgtcctcaaaaacttaaaacctcttcaactctcacctaaattaaaatctaagcatcttattttcttctgcaatgccgcttgaccccaatacaaactcaacagtagttccaaatagccggaaaacggcactttcaatttttccatcctacaagatctaaataattcttgttgtaaaatgggcaaatggtctgaggtgcctgacatccaggcattcttttacacatcggtccctctctagtctctgttcccaatgcaactcatcccaaatcttccttctttccctcccacctgtcccctcagtcccaaccccaagcgtcgctgaggctttctaatcttccttttctacggacccatctgacctctccccacctccccaggctgctcctcgccaggcccagctaggtcccaattcttcctcagcctccgctcctccaccctataatccttttatcacctcccctcctcacacctggtctgccttacagtttcgtttcgtgactagccctcccccacctgcccagcaattgactcttaaaaaggtggctggagctaaaggcacagtcaaggttaatgctcctttttctttatcccaaatcagatagcgttttcatcaaacataaaaacccagcccagttcgtgactcctttggcagcagccctgagacgctttacagccctagaccctaaaaggtcaaaaggccgtcttattctcaatatacattttattacccaatctgctcccgacattaaataaaactccaaaaattagaatctggcactcaaaccccacaacaggatttaattaacctcgccttcaaggtgtacaataatagaaaaaagttgcaattccttgcctccactgtgagacaaaccccagccacatctccagcacacaagaacttccaaacgcctgaaccgcagcggccaggcgttcctccagaacctcctcccctaggagcttgctacaagtgctagaaatctggccaccaggccaaggaatgcctgcagcccaggattcctcctaagccatgtcccatctgtgtgggaccccactggaaatcggactgtccaactcacctggcagccactcccagagcccctggaactctggcccaaggctctctgactgcttcccagatcttcttggcttagcggctgaagactgatgctgcccgactgccttggaagccccctagaccatcacagacgccgagcttcgcgtaactctcacagtggaaagtaagtccgtccccttcttaatcaatacggaggctacccactctacattaccttcttttcaagggcctgtttcccttgcctccataactgttgtgggtattgacagccaggcttctaaacctcttaaaactccccaactctggtggcaacttagacaatactcttttaagcactcattttagttatccacacctgcccagttcccttattagggcgagccactttaactaaattatctgcttccctgactattcctggattacagctacatctcattgctgcccttcttcccagtccaaagcctcctttgcgtcctcctcttatattcccccaccttaacccacaaatataagatacctctactccctccttggtgaccgatcatgcatcccttaccatctcattaaaacctaaccacctttaccccgattaatgccaatatcccatcccacagcatgctttgaaagggttaaagcctgttatcacttgcctgctacagcatggccttttaaagcctataaactctccttaccattcccccattttacctgtcctaaaaccaagcaagccttacaagttagttcaggatctatgccttatcaaccaaattgttttgcctatccaccccatggtgccaaacccatatactctcctatcctcaatacctccctccacaatccattattctgttttggatctcaaacatgctttctttactattcctttgaacccgtcatcccagcctctctttgctttcacttggactgaccctgacacccattaggctcagcaaattacctgggctgtactgccgcaaggcttcacagacagcccccattacttcagtcaagcccaaatttcatcctcatctgttacctatctcagcataattctcataaaaacacacgtgctttccctgctgatcgtgtccgattaatctcccaaacctcaatcccttacaaaacaacaacgcctttccttcctaggcatggttagtgcggtcagaattcttacacaagagccaggaccgcaccctgtagccttcctatgcaaacaacttgaccttactgttttagcctagccctcatgtctccatgcagcggctgctgccgccctaatacttttagaggccctaaaaatcacaaactatgctcaactcactctctacatttctcataacttccaaaatctattttcttcctcacacctgacgcatatactttctgctccccggctccttcagctgtactcagtctttgttaagtcccacaattactattgttcctggcccggacttcaatccggcctcccacattattcctgataccacacctgacccccatgactgtatctctctgatccacctgacattcaccccatttccccatatttccttctttcctgttcctcaccctgatcacgcttgatttattgatggcagttccaccaggcctaatcgccacacaccagcaaaggcaggctatgctatagtacaagccactagcccgcctcttagaacctctcatttcctttctatcatggaaatctatcctcaaggaaataacttctcagtgttccatctgctattctactactcctcagggattattcaggccccttccttccctacacatcaagcttgaggatttgcccccacccaggactggcaaattagctttactcaacatgtcccaagtcaggaaactaaaatacctcttagtctaaatagacactttcactggataggtagaggcctttcctatagggtctgagaaggccaccgcagtcatttcttcccttctgtcagacataattcctcagtttagccttcccacctctatacagtctgataacagaccagcctttattagtcaaatcagccaagcagtttttcaggctcttagtattcagtgaaatctttatatcccttatggtcctccgtcttcaggaaaagtagaacggactaaaggtcttttaaaaacacacctcaccaagctcagctaccaacttaaaaaggactggacaatacttttacgactttcctttctcagaagtcagacctgtcctcagaatgctacaaggtacagcccatttgagctcctgtatagacgctcctttttattaggccccagtctcattccagacaccagaccaacttagactgtgccccaaaaaaacttatcatccctattatcttctgtctagtcatactcctattcaccgttctcaactactcatacacgccctgctcttatttacactgccggtttacgctgtttctccaagccatcacagctgatatctcctggtgctatccccaaactgccactcttaactcttgaagtaaataaataatctttgctggcaggactgtgctgaatctccttaggcactctctaatcagatgtcctgagttgtcccaattcttagaccttttatacctgtttttctccttctcttattccatttagtttttcaattcatacaaaactgtatccaggccatcaccaataattctaaatgacaaatgttccttctaacaaccccacaatatcaccccttaccacaaaatcttccttcagcttaatctctcccactctaggttcccacaccgcccctaatcccgctgaagcagccctgagaaacatcgcccattatctctccataccacccccaaaaattttcgctgtcccaaaactttaccactatttagttttatttttcttattaatataagaagacaggaatgtcagccctctgagcccaagcaaagccatcatatcccctgtgacctgcacgtacacatccagatcgccggttcctgccttaactgatgacattccaccacaaaagaagtgaaaatggcctgttcctgccttaactgatgacattttcttgtgaaattccttctcctggctcatcctggctcaaaagctcccccattgagtaccttgtgacccccactcctgcccgccagagaacaacccccctttttcctttaccttcccaaatcctataaaaccgccccacccctgtctcccttggctgactttcttttcagactcagcccacctgcacccaggtgattaaaagctttattgctcacacaaagcctgtttggtggtctcttcacacggacgcgcatgaaatgtataatgctttgtcagctccaaatcataccctcaactttccattttacatctccgaaatctggatgtatcttagagtcgatgatgcaattataattggtagcttcctttctttatgttagtacataaaaataagggtgcatcctacaaatgatggcttctgagattagataaaatacctttctattagctctgtggttctctgcctgtgtattgccaggaggaaggaagtggagcatttcaggtgaggcacagggttttggtatcaattcctaagattcctttcatggtccagcccctggtgtgcattatcctacagttcctccctctatcgcaccctcagccacttggtgtgtctccttatttctgctcctcttgcctaccagcatgtgcctgatgactgaatcctgcccacccaaatgtcaagagcctaccagagatggcttattctcctccactctcctcagtgcatgtgggtatgtgtgtttggagatgactggaaaagcacagtggctacccattaaactgacttaggggtcacactagagaggaagaccatgaagaaaactgagttccagcctgacagcagaagggcagagctttctgggctactggctctaagggcaatgcatatatctgctgatttaaaataataataacaataatggctttgggtttccttaggttatcctccaacccaaagaaaccagtgggcagacatgtatacatggagtggactgggtcagctctttggcttcctagcatgttctgccatctctttttttctgatgacagaacaagcccttgcccacagggtaaaaacctgatgccagcctggccccctggagtccttctaggaccctggaagagagctgttctctttctctttgttttgttaattttaagctgcttccttgccatgcaaagagagaaagcccaagcaaagaccagcataggcagagagccggtagagcggcctgggtccttgtatcctgtgaagcatcacggttatccttctctgcacatgggccagtgcattcctgttctgcttaaacaagcttaagttgttccttcgagtcaatacaagataagatattttaaacctctctctactttaaactatccctctagcttagctgttctttttgaaagttatttgcaacaaacaattcaagtttgagatttgggagggcagaatgcccatattctgtgttgattgaaaggagattcctgggccttaggtccctgctttggttgagaagttgtgatgataattaaagagcctgcgtagattctcactagaggcagggctctgccttgagttgggtcggggtgccaacaggctgctctggatttatccgaagtccttatcagggtaccggatggggcattcaatgaagtttgcaccataaagccctaagaactccaggcttgaagattctctgcaaaaagtgttaccatagccagtcattttggtttgccataaccgataagggcttatctttctgacagcacttaccaacctagttcctctgatttttgagtcatgtcctagaaaaagagctgagcccaaggaactacagcttggaggatatatctgatctatctgcgatggcaggaaagcatgcatctagttgatctaaaaactagatggcattattgaggagttggacaggcggtcttaggaacaacctcgttttatactttttaaaaataggaatttacttaaaggcaacttccatctgctctcattctggcagaggtattgtgataaaggctttcaggaatgtcaacagctcaggattggcattagctcatagataattcccgtctactaaattaaagtctatgagagattgatgcatgcaccagagtcttgaattattaggcaaggatcttgctaaagctggacatgggaaggttgctatgaaactcatttcaaaggctgtgtaggccaactcacctctgggaaaccaacgcttattattaaaccaatgcaactgctcaaaaactaaaactccatcactatctaagttccccatcatggtgtgtgaaatcatttccagaaaactcttcaaaagataccgaataaaaggcatcacaggccgggcacggtggctcatgcctgtaatcccagcactttgggaggcccaggctggtggatcacctgaggtcaggagtttgagaccagcctggccagcatggtgaaaccccatctctactagaaaaatacaaaaattagccgggtgtggtggtgcgcacctgtaatcccagctacttgggaggctgagccaggagaacctggcaggcggaggttgcagtgagccgagatcacgccattgcactgcagcccaggtgacagagtgagactccatctcaaaaaaaataaataaataaaaataaaaataaaaaaagccatcacgaaaagacatttctttatcaggtcagcaaattgattgctggtttcaatctctcaagaagtcagattcttttcagacactcctttgtgtttctttacaatgtaatcagtcattccagggtcagctatgaggcacactcccctggcctccctcataagcaatttaattgcaaagggttagcatactatttcttctctgctattctcagaattctcaattatgaaaacaaaaacaataattaaaaagttcttccagctgattttttttttttttttttttttgagacagagtctcacttaaactctgctgcccaggctgtagtgcagtggtgcaatctctgctcactgcaacctctgcctcccacgttcaaccaattctgctgccttcccccctgatccccgagtagctgggattacaggtgtgcaccaccacgtccggctaacttttgtatttttagtagatggggtttcgccatgttggccaggctggtctcgaactcctgacctcaagtgatccgcccgcttaagcctcccaaagtgctgggattacaggcgtgagccactgcgcctagccccacgtgcatttttttttttaagggaggcaggaaagaaggcatttgggcctcttatctgcaattttcttccgtgtaaacttatgtgaaggatctggagtgggacttggtggcttcaagccctggctccacttcttgatggctgcgcgacctgggttaagtcacgcaacctctctgaaccctagtttattcatctgtaaacaggtcaataatagcacgagattcgcagcgcgagtggagctcaaagtgcagggttgtccctggtgaacctatcacttttatatttatcctttgatgaagccagtacaattcctacctggttaaccagatacatcccacctcttccctcgagttcgcccttccccccgcctcgtgaagtccttgttctcttagctgtcttgaaaatcctatgcatcagcatgtaggaaagggcgcgccaggcgggggaagccacccccgcccaagcgcctccggcttcccttataaagggagggcccccttcgcgaccgcaagcgcgcccaggaagaccacagagccgccggtgcgcagcgaggtggcgatacgcgcccgggctcggcctgcgggtggtggcccaagcgtccgcctcgctggcctggcaggcgcgactgtgcgtgcgcagccgagggtggtggcggccggcaccccacgccaagggtggtggtggccggcaccccaccctcggccgccgcctccgcgtgtcaggtgccgtgagaagcgcgggaggagcggccgcaggcagcgcccagggatatgactggagccgactttccagaagcggcgcacgcaaagcccagctccgcacgcaaaggggaggcgacagcagaaacttcaacccgataaagttcgccggagcgcggagattcgcctcctcctgccactctccgccccgctcgggtcccgccccgctagctcccccaggcccccccagtcgccccagcttggctccccgccctgcgccaacggcttccatcgcagcctgggcggccccgcgcccaccagcgggcggcgccacctggagtggcctctacgcgggaaatctcagggccagctgcgccccaggagcctttgtgtgcccaagcactgtcggggccccggggcgggggagcggctacttttagggattcctgatctcgccgcaagaactggaaaaaatttagcatgccaaagagcctccactgaggtggcaatttgtttgcgagaacctaagataaaatttaaacaaccaaccaggggcgctgtgaggcaaaccgctgccactacactggctttccgggaagcaagctcaagtcgcggagagggaagggaggtcgtgcgctcggggcggggcgcgctcccaagtcgagcgcagcggccggggcaggttgtaccgagcgtggttctggggacaccgtgcggcctcgattggaggtggctgtgatgaagcgcggttaccgcacaatggaaacgtgggcacctccgctcccatgaaagcctgctggtagagctccgaggccggccggtgcgcctggacgggagtccgggtcaaagcggcctggtgtgcggcgcgccccgccccccgcaggccccgccctgccaggtcgcgctgccctccttctacccagtccttaaaacccggaggagcgggatggcgcgctttgactctggagtgggagtgggagcgagcgcttctgcgactccagttgtgagagccgcaagggcatgggaattgacgccactcaccgacccccagtctcaatctcaacgctgtgaggaaacctcgactttgccaggtccccaagggcagcggggctcggcgagcgaggcacccttctccgtccccatcccaatccaagcgctcctggcactgacgacgccaagagactcgagtgggagttaaagcttccagtgagggcagcaggtgtccaggccgggcctgcgggttcctgttgacgtcttgccctaggcaaaggtcccagttccttctcggagccggctgtcccgcgccactggaaaccgcacctccccgcaggtcagtctgtctgccgaggcgctgcccggcgacctcttcagatggattattacaggtagcgggtggcgtggtaggtactttaaaggaaatcaagcgccaccgcctcgatgcccgcagcgttgtccccagattgcaggaaccgttacgcgccttgcggggaggggaagggtttggcgctgggttacagcgaggtggaaacacgccccttctcttctccaagggagagtgggttggggatgggaaggggcgtcttcggccatttctccagagagtcagctccgacctctccacccaacggcactcagtccccagaggctggggtaggggcgtggggcgcccgctcctgtctctgcacccctgagtgtcacgccttctcctctctgtccccagcatgggcaccagcctcagcccgaacgacccttggccgctaaacccgctgtccatccagcagaccacgctcctgctactcctgtcggtgctggccactgtgcatgtgggccagcggctgctgaggcaacggaggcggcagctccggtccgcgcccccgggcccgtttgcgtggccactgatcggaaacgcggcggcggtgggccaggcggctcacctctcgttcgctcgcctggcgcggcgctacggcgacgttttccagatccgcctgggcagctgccccatagtggtgctgaatggcgagcgcgccatccaccaggccctggtgcagcagggctcggccttcgccgaccggccggccttcgcctccttccgtgtggtgtccggcggccgcagcatggctttcggccactactcggagcactggaaggtgcagcggcgcgcagcccacagcatgatgcgcaacttcttcacgcgccagccgcgcagccgccaagtcctcgagggccacgtgctgagcgaggcgcgcgagctggtggcgctgctggtgcgcggcagcgcggacggcgccttcctcgacccgaggccgctgaccgtcgtggccgtggccaacgtcatgagtgccgtgtgtttcggctgccgctacagccacgacgaccccgagttccgtgagctgctcagccacaacgaagagttcgggcgcacggtgggcgcgggcagcctggtggacgtgatgccctggctgcagtacttccccaacccggtgcgcaccgttttccgcgaattcgagcagctcaaccgcaacttcagcaacttcatcctggacaagttcttgaggcactgcgaaagccttcggcccggggccgccccccgcgacatgatggacgcctttatcctctctgcggaaaagaaggcggccggggactcgcacggtggtggcgcgcggctggatttggagaacgtaccggccactatcactgacatcttcggcgccagccaggacaccctgtccaccgcgctgcagtggctgctcctcctcttcaccaggtaaagcctctgggaggcgtgggccaggtcttttctcctctgaaaaaggcggagtagagacagaatatgctgagtttgcaagcagggccccgggtttggggtttcgctccaggtccccacccctcaaaaccaagatcgcgtcggtaaagggactcacagtgagggctgcgacacgcgcacgcgccccacccagcggtgccccgacccctccggtctcctatcttgtctctatcgtcccctcccctgcttgcgagtgagaacacatttgcaaagacccctccaccccccggaaaaacaagagtttttaaatgcttggagatgagccctgatatctctctccctggcgcattacaatcagaactggaatagttccgaaagaaaaggtaatgtcataaatatgttaaacacagcagcctctcctaggctagtcctcggcgtgcatccgaggccgcccagccctggcgctaaaagcgggccgcccgtcagggctttgttccaggccaaggaagcccatggaggccgggccagccgacaggtaacccgcacagaaactttcagaaggcggccacaactagcgggcagcgctaggtttataaaacctccgcgctaggagtttgagaaatgccggggtagaagacaagaagcagtcacttttacgaaagcagagtagcattcagaaaggcagatgggatatccaggaggcgcctgcagacgtttctggcccctgcgcttggctcagttagcggaccccctgatgcccacgttggtctctactaagcacggattcaacaggtccctggtgtcgggttgccagatttggcaaaagaaaagtaagttttacacgggaatactcacactaaaagattagcccttgttgatctgaaatccatatttaactgggcggcctgtagtatttactgtggaaacactatccctaggggcaaatgtttcgcaaggcaaattttgattgccgaagagaccagaaatcctggttttgtgtcatttcttggagcacaagtgagcagttggagatgctgaatctgcaggcgccacagaaaggtgtttggaaggcagagaatgactctttccttattaaaatccactgcaatctatatttccttagatactgtacagctaccttcacaaattaaaagtttctgtatacttaaaatggctttttagtattaaaatcatagaaacacccatggtgggtgagggagaggcagaaatcgaataaagaaaagtcaaccagagatcagggaaaaggaaatcccggaataggttccataggtttttgtgcatccgcagataggcattttaacttttgaaacggcctttgtttttcattagaaccacaatagttctccgagtactccaattaggcggcaaaaagaaataaaacaatttggaggtcactttcaattcaatatgctgatactttttttttcctttttagtgaaaagacgtatgacagggcttggcaaattacacgatctgtttttgtatatacgttttattgacgcagtcatgcccattcatttatacattgtcgatggctgcgttcactctacaacacaaggcagagcagagtagtgcaacaaagagggtttggtccacaaagtctaaaatagatactctctggctctccccaccatacatgtttctatgaaaaaagttggcagactcctgcaatataatgttgaagaagcgattctaaaaataactccacttcatcacatacgtgtatacattttttttcggagttgcaaacaatcagttacttgttttttgacttctaacactttgactcaaggtagtggacatttctaatcttttaatatttattttggtaatttttgatggctatatagtattttgctatgataatgtatagttatatataatcatttattgaactttaatgttggtcattggccttgattgcatttttaaaatttttattttaattttatgtatttacttaccttagagacagggtctcactaccttacccaggctggtcccaaactcctgggctcaagcagttctcccgccgctgtctggcaggtagctggggctacaggcgtgtaccaccatgcctggctaatttttagaattttaggtcctgttgtggttacatatttttgtatctcttaaattattttctgaaaatacatttctaggcatggattactgggtttaaaatgaggcgggaagaggttaccttcatgtctcttgcctcgtattaagattttgttttttaaaaagattgtatcagtttgtatcatcaacagtgaataagtactacagtttgtaccataattttatgaacattgggtatttgctttcaaatttaaaaaatacagtatgtagctttatccatcaggacaccaattatctttgtataaaatgagaacagcatgtctgttggaattgtccagggaaatgagggagaaaaaaaatttactttcacattgtaactttcgtgggccctgggtgcttttgcctttgtagattccttatactataaaaaaattaaaaattaaatttcatgactaccctgatataaagatgaatgcattaaaatgatgtatgaaaatattttcttctaactaaaagtgagtttttttaggtctgaagattgtaaaagacgtaaaaatattttcatgggcccctaaaaagtgttgtgagccctaggcactgtccctgcggtacccaatggaaaagtcagccttatctactattgtgctttttgaggctgggaaaacttaagagttttttgacttataatgggaaagacagcattagtcatgcaaggcctattacaggaaatataattcttaaagtccatcttgtaatttagtgagaaattaggaagctgttttagatttttttcccagaaatattaatttagtcactgagctagatagcctatttaagaaaaagtggaattaaaataaattataatgtgctttctagatgaaataagaattttgctcacttgcttttctctctccacattaaacaccaaacaggtatcctgatgtgcagactcgagtgcaggcagaattggatcaggtcgtggggagggaccgtctgccttgtatgggtgaccagcccaacctgccctatgtcctggccttcctttatgaagccatgcgcttctccagctttgtgcctgtcactattcctcatgccaccactgccaacacctctgtcttgggctaccacattcccaaggacactgtggtttttgtcaaccagtggtctgtgaatcatgacccactgaagtggcctaacccggagaactttgatccagctcgattcttggacaaggatggcctcatcaacaaggacctgaccagcagagtgatgattttttcagtgggcaaaaggcggtgcattggcgaagaactttctaagatgcagctttttctcttcatctccatcctggctcaccagtgcgatttcagggccaacccaaatgagcctgcgaaaatgaatttcagttatggtctaaccattaaacccaagtcatttaaagtcaatgtcactctcagagagtccatggagctccttgatagtgctgtccaaaatttacaagccaaggaaacttgccaataagaagcaagaggcaagctgaaattttagaaatattcacatcttcggagatgaggagtaaaattcagtttttttccagttcctcttttgtgctgcttctcaattagcgtttaaggtgagcataaatcaactgtccatcaggtgaggtgtgctccatacccagcggttcttcatgagtagtgggctatgcaggagcttctgggagatttttttgagtcaaagacttaaagggcccaatgaattattatatacatactgcatcttggttatttctgaaggtagcattctttggagttaaaatgcacatatagacacatacacccaaacacttacaccaaactactgaatgaagcagtattttggtaaccaggccatttttggtgggaatccaagattggtctcccatatgcagaaatagacaaaaagtatattaaacaaagtttcagagtatattgttgaagagacagagacaagtaatttcagtgtaaagtgtgtgattgaaggtgataagggaaaagataaagaccagaaattcccttttcaccttttcaggaaaataacttagactctagtatttatgggtggatttatccttttgccttctggtatacttccttacttttaaggataaatcataaagtcagttgctcaaaaagaaatcaatagttgaattagtgagtatagtggggttccatgagttatcatgaattttaaagtatgcattattaaattgtaaaactccaaggtgatgttgtacctcttttgcttgccaaagtacagaatttgaattatcagcaaagaaaaaaaaaaaagccagccaagctttaaattatgtgaccataatgtactgatttcagtaagtctcataggttaaaaaaaaaagtcaccaaatagtgtgaaatatattacttaactgtccgtaagcagtatattagtattatcttgttcaggaaaaggttgaataatatatgccttgtataatattgaaaattgaaaagtacaactaacgcaaccaagtgtgctaaaaatgagcttgattaaatcaaccacctatttttgacatggaaatgaagcagggtttcttttcttcactcaaattttggcgaatctcaaaattagatcctaagatgtgttcttatttttataacatctttattgaaattctatttataatacagaatcttgttttgaaaataacctaattaatatattaaaattccaaattcatggcatgcttaaattttaactaaattttaaagccattctgattattgagttccagttgaagttagtggaaatctgaacattctcctgtggaaggcagagaaatctaagctgtgtctgcccaatgaataatggaaaatgccatgaattacctggatgttctttttacgaggtgacaagagttggggacagaactcccattacaactgaccaagtttctcttctagatgattttttgaaagttaacattaatgcctgctttttggaaagtcagaatcagaagatagtcttggaagctgtttggaaaagacagtggagatgaggtcagttgtgttttttaagatggcaattactttggtagctgggaaagcataaagctcaaatgaaatgtatgcattcacatttagaaaagtgaattgaagtttcaagttttaaagttcattgcaattaaacttccaaagaaagttctacagtgtcctaagtgctaagtgcttattacattttattaagctttttggaatctttgtaccaaaattttaaaaaagggagtttttgatagttgtgtgtatgtgtgtgtggggtggggggatggtaagagaaaagagagaaacactgaaaagaaggaaagatggttaaacattttcccactcattctgaattaattaatttggagcacaaaattcaaagcatggacatttagaagaaagatgtttggcgtagcagagttaaatctcaaataggctattaaaaaagtctacaacatagcagatctgttttgtggtttggaatattaaaaaacttcatgtaattttattttaaaatttcatagctgtacttcttgaatataaaaaatcatgccagtatttttaaaggcattagagtcaactacacaaagcaggcttgcccagtacatttaaattttttggcacttgccattccaaaatattatgccccaccaaggctgagacagtgaatttgggctgctgtagcctatttttttagattgagaaatgtgtagctgcaaaaataatcatgaaccaatctggatgcctcattatgtcaaccaggtccagatgtgctataatctgtttttacgtatgtaggcccagtcgtcatcagatgcttgcggcaaaaggaaagctgtgtttatatggaagaaagtaaggtgcttggagtttacctggcttatttaatatgcttataacctagttaaagaaaggaaaagaaaacaaaaaacgaatgaaaataactgaatttggaggctggagtaatcagattactgctttaatcagaaaccctcattgtgtttctaccggagagagaatgtatttgctgacaaccattaaagtcagaagttttactccaggttattgcaataaagtataatgtttattaaatgcttcatttgtatgtcaaagctttgactctataagcaaattgcttttttccaaaacaaaaagatgtctcaggtttgttttgtgaattttctaaaagctttcatgtcccagaacttagcctttacctgtgaagtgttactacagccttaatattttcctagtagatctatattagatcaaatagttgcatagcagtatatgttaatttgtgtgtttttagctgtgacacaactgtgtgattaaaaggtatactttagtagacatttataactcaaggataccttcttatttaatcttttcttatttttgtactttatcatgaatgcttttagtgtgtgcataatagctacagtgcatagttgtagacaaagtacattctggggaaacaacatttatatgtagcctttactgtttgatataccaaattaaaaaaaaattgtatctcattacttatactgggacaccattaccaaaataataaaaatcactttcataatcttgttatgaagttttatgttgtagcaaatatagtctaatgtatcactttatttcaactattactatggattattcaattaaaatattgcactgtaaacattttatttgtccattctacatttcaggccgaggccacatgcttttttttcccgtaggttttcatcaaccaaatttctaatctctatatttttgaatttctaagaaccaacacggaggttacatttcaatcaaacaatcaagccaaatgagaattaatttgcaatgttgaaagattgaatagattgcgactttaagttgctgatcgatttctgcttcatctaaagaatgcagtacacatttttcttcctcagcctcataccagtcctttctctgagtattttcttctttcatttttttaaaggtacatgtgcctcaattagtgcaattaatgtccaataaaataagatgggtacaagtattctgtcatgtactatgtggaaatgttttattgccaatctttttacttggtaaaaatacttgacttcacagggcctaggtcatgactctccaggccttcactgtgccacactcacagatgacagggcttgcggtaccaaaggctctttatcttccagactacagctcctattaatgtgaaaacaggaaaagaagtaaaaattgcacaaaatggcattgaaactttggcgtgggaacctcactttagcagccagaaggtatggctatggagtggtttaagagaatactcactagttttccagatgtatgacagtaggatcttggaaatgtcaggacagttaagaataagtgaaggaaatattttcatgggaaaaatattcctttaaataattataattggggccagtttttgcacaactgtctagcagagttggattctacccaatcaatccaacagagtataagaccggagtacagggtgggaaatgaatgcagctttggacataagtaagacaggcgtggttgttagaaactcacagaggttgtttcttcaacctcaacgccagtctgtttttctgcaccagtgcaacagaagttcactggctgttaactctccgttttttggctcagtgactctcacatgctctctgctctccagtttcagtctattagttataaatctcagaaagtgaaaaggaaagaagaaaaaaattaaatatattcaaatacatttaaaagcaatttttttaacttggaattatggaggaaaataatcta

SEQ ID NO: 39 - DNA, 94237 bp, Homo sapiens
ggaaatgcagtatgtacccaactgaactatgtcctcttggagggaaggaaaccaccagtgccctcttccacagactgatgtcttatgctttcccggaggcagcagagcacattggccctggaccagtgactctttcaccattggttgaatgacagttacaaatgcacaactcccttcagaggcaaaacttcattcctaagcctagcaatggaagatgttagtctccaagtcatcagtatacaggtgtgaggaatggagaagctggggttctttaaaactgcatccttcttaccagcaagcacttaggaattcaaggaggaaaaaaagtttgactcttgcctcaaaaaaaaaaaaaaaaaaaaaaagaaatcacagaactctttttgaaagatgacaaattctagatttgtggggtcaaaagtcacaacatttaaaagaagatacagcacatgtctgtgtggaatatctcacgacattggcctaaagccaaacacagggggcatagttttctggacctggagttcagtgacagggagtgtgagtatagattttgtgaagtcacaaaaggggctggtttcgtttggatggagtaacatgcaagtgtgagggaaggagtgactcaggcaaggcttttcatagagaaagagtctctgccagcttgtcctctctcccatctctgctccttacctcccctgctctctccaccccgaaaccaactaaatagccagacaagggtcagatgggtattacgtgagataaggcatgtggcaggacagaggccagtgtacttgcatgactcttaaaggcctcttttgcctcaccctggtcccaactccaatatgtgacaatgcattggaagttgtaaggtactaatgagatagcccatccttccaagagctgttcctgttagatcccatccattccaacctaatttccaactgcatcctggaacatactgttacttcgatgggagtactgaggccatctttcttccaccagcccactgcatcccaggtgcctgctctctgccaggtttgtaagttcacactttatctctatcccatcctcctgagggcacaccctacaaagaaaagaggaagcaagagaatcagatttgtcccttgtcaaaacaaataggtgtttcactggtgccacagcttttgttcccaaaccatccaatacagggttggggggcaggtagggagatttgctgggaggtgggcagtttgctcctattttaagcagcttgggagctttgcctaccggtgtcctctgctgccctctgtggccacaacatcagtgtctctaaagacacccctctgaatccggggacccagctccccatcccccactcactgccccagcatcacctttcaaagtttttctcctctagttctccacaggctctaaaaagtaaaattggatgcaccctagccacagcctgcatctggtttacactctcagctccttcctgcaaaggttattgagctgagtcctggaagaaatctcaggccacccggctctgctctaagcaaggctgggtgcaacccttttgagagttattataatgagtttttggtgtatctcagacactgccaaaatcccggacttggcaaggtgcggtggcttatgcgtataatcccagcactctgggaagcccaggtgggtggatcacatgaggccaggagttccagaccagcctggccaacatggcaaaactccatctctactaaaaatacaaaaattagccgggcatggtggtgcacatctgtagtcctagctacttgggaggctgaggcaggggaatagcttgaacccgggacgtggaggttgcagtgcgccaagatcgtgccactccgctccaacctgcgcaacagagtgagattgtctaaagaaaaaaaaaaaatcccagactcaatgccagctgtttgtgttagcctggggatccttcacttatagggtgcagtctggccaagaggaaggagctatataacatggttgatggaatttctaacatttaagctcaggggtacatgtgcaggatgtgcaggtttgttacataggtaaatgtgtaccatggtggtccactgcacagatcatcccatcacctaggtattaagcccagcatccgttagctattgttcctgatgctctccctcctcccacccctcaccctctgacacgccccagtctgtgctgttcctcccatgtgtccatgtcttcttaggttgatgtggtcttgagtgacccctccttgcctttcctctttaaaaacaagatctaaaaggctatgttctctatgggttggaggtgttgcctcgatctgtcaagcacagtccaggactcagaggctgttgtggtgaactactgtaggcacctggaagccaccaaggtgcccttttcccgcactctagtcccaagtgagggaaataagcctatggttaagggagaactatctaccaatttgaactcattaaaatacataaatgtgtccactagaaatggctggctggagaagcccagtaccaaatcaccccgttcctgaaacccaccagccccatgaaatagttcgctagagagagatttgcaatctttgaattcgttgactatcaacctgtataggtgctccgtgccccgagatctgagaaaatgacaaaatacgtctacttcccggccgggcacagtgactcacgcctgtaatcccaatactttgagaggccaagttgggcagatcacttgaggtcaggagtttgagaccagcctggccaacatggtaaaactcccgtctctactaaaaatacaaaaattagctgagggtggtggtgggcgcctttaattccagttactccggaggctgagccacaagaatcgcgggaagcggaggttgcagtgagtcgagatggggccacagcactccagcctgggcgacagagtgggactcagtctcaaaaaaaaaaaaaaagtatttcccaattcttcgtcagtttttgccctctccccacttcgccttctccaggctcctgaaaagtatctcccccaaccctttctgtgtacacggggaaaacacgtgttcatttttattatggcgctgaaacctacccttctcttcaaatcgcttctgtagatcgttctagtataaaatgtggcaagaggctaaagggagagatatagaccagttctttggccctcgctttccaacttcaagttacacctgtgaaactcatgggtccttccacagccttcaaaaactaagggcgtcccctgtcctctccccagatgtcccttccccatcgccggtagcgagtgggagacagctcagcgcggggcaggggagcactgggcccggagatggaaggcagcgtcaaaagcgccgctggaaaatccctgagcgctaaccgttgcctgtgtgagcccttaaatctacaaatttccaacacctgtagcctttgggtttcccaggacttccatcgaccctggcggcagagagggcaggcctgagatgcagtgacttgagggcacatggccaactcttgtcactccaagatcacactggggaaccagactgacttctccaattctgaactcgccccggcctcgggcggctcaaagggcctcctctgccgcatccccgccaaaaccaaaccgcctggcacaagccggtaagcaaccaccctgctgggagagggaaggaagagtaggcgcagccctagatcaatttccttgcactgcttctcccagacggtcaagtcagctgcgtcccaccgaaaagggcgcatcgcccacgcccgaaacgcagccgctgggggccgagaaattatccccacctggcccgagggccagggacgcaggagcgcagcagcgtggaggggctccgcgctggcccggcgctgcccgcggtcctgccctcgttccaagggcacggcgccggtacgaggacaccgacgctgtggcgcaactgccgtcccccgcagcaatcccggagcccggctcccggccgcccctcggccctgcgcaggctgcctctccccgacgcggagtcccaccccgctacccgccgcccagacgacctcataaacaagtcctcgaagtgcggaggcaggaggcggggcgcagcgcgggggcaggaggcgggccagggtcagggcagaggctgcggccgcgcgtccccattggccgggacgcagtgagccgcccggagctcggcgcgggcggggcctgccggcgcgtgcccgcccacacacccgcgccggtgcccgccccccgccctccgcgcccgccccgtgcccgccccaagccggccgacggagtttttaaagtgggctgccggccgcgggagctttacactcgcgagcggaccgccacacgggtccggtgcccgctgcgcttccgccccagcgctcctgaggcggccgtacaatcctcggcagtgtcctgagactgtatggtcagctcagcccggcctccgactccttccgactcccagcattcgagccacttttttttttctttgaaaactcagaaaagtgactccttttccagggaaaaaggaacttgggttcccttctctccgtcctcttttcgggtctgacagcctccacccactccttccccggaccccgcctccgcgcgcaggttcctcccagtcacctttctccacccccgcccccgcacctagcccgccgcgcgccaccttccacctgactgcgcggggcgctcgggacctgcgcgcacctcggaccttcaccacccgcccgggccgcggggagcggacgagggccacagccccccacccgccagggagcccaggtgctcggcgtctgaacgtctcaaagggccacagcgacaatgacagctgacaaggagaagaaaaggtaagcgggcgtccgggccgatcagggggccggtccgaggccagggccgggctgcgcggggcaggcgcgaccgagagtggttgggagaagagtgctgagaggtcttcggagctcgaggctcggtttggagggctgtgagggggagagcatgtgcccggtttgggggcgcggatcagcagctttgcagtggagacttctgcggctcggaggagtcggggatttgcgcgcacggcgaggccaggaggccgagggagatggcctggaggtcggaggtgcttccgcggtgcctttgaaaatctcccagccgccccgcagcagattaccgtggccaccggcgcttggaaatgtttgtgggtgcatgtcctcgactttctctggtctctcattttggggcagcatccacgtctctatttttctctggattcgcggagtccttccaaatgcgctcctgtgcccgcgccgcggcccaagtgggcaaaggggggcgggaggcggagagcggctcagggacacgatcctaccgaggagccaggacccttcagagcgccccgctgccgggctccagaccccaccgaaggttggagaacccacttcctcgtgccgcaccttgactctggggagagtaggtagtgagtgacctggattgccctgcgggggcagatggttcggtgtgtaggaagcggacggcaacactggatgtccctggcaggtccgggtgtctgtctccgaagaggacagagaagggcagccacgatctgcccgcctgccctcgcgagcctctcggcactgggtgagaggcaactctggccatttcttgctgccctctcgccctctcccggccgctcccagtccagccgggcccggcgctacccgagcgagggttcgagccctctgcgcggccgcgcagaagcaggcagggcctcaacttctgcaaatgtgtgcggctcgccgcctgtcccctttctcctcctgtctccacccgtgcggccccagtggcctggagcttccagccccgcgcttggccgcggcttggcgaggctatgctgcgggaagctggaatccaacgcgcggccggctgaaccgcctgagccgcgggaaaccagcggcggagcggcggtatagaggtgcgaggatgaggaggaccgactcgctaagggagggaggtgactggccgggagggctcactgccgaggttgatttgctcttgttccaacttccactacgggactggagccagaaaccgtgtatcctccggtcgaaagcagcggttcccacctcggggcaccgataaggatttgataaacgggagcgaatcgcgcctgtcctggctcggcgcccgggcccttcactgcgggatcgctaggggaggggattgggccctgctcccctttcctggccgtagtcccccctttctcgtcaccgtcgcgccctcagacccaagacaagtgagggagccctgagactgcagccggcacattcccagggccctcggagcagtcctggggttccatgtcttttgaaggcagcagagcaaggaaaagactcttaagattccagtgcgttttgtaaaaaccaatcataatgctaataatgactgaaccatcgaaaagcaaagttatagacagcgcctgcagacgctttcgggtccggagccggggagggaacttgtgtattttacaactgcgatgcctatcgggaatgtggcaatcgccgaggtggggcctgacagtaatcttgacaaatgtgtgaagtgtcagctcctcctgcgctccttagcgccgggttttgtgcagttttgtaccgtatataccgagaaacttgggagcaggggaaaaatgatttcgacacacccagctacagtacctggttcgttagcggactgttggaaagagagaagaagcgggaatgggagcgggaagaacgttgcgtaattagactcccaattattggcgagagcggccgctttaagaaccactgtggggactgcctgcgaaacgccttggaggccgctgtgtgagctgcggctccgggctggtggccacgcgagggtgtccgccctcttcgacctgcctggatttttgtgctgcagaatggcagggcaaacagcgtgtccttcaccatctagagccccttaaggggttgtccaattcctattgggctaatcagtttgagactcatttacttttcgtgcctgggtctgtttgctggctgcaggcttctttagggaccaagatgtaattaaaatatgtgaaccaatacattgaaagttggtgttgtcatgtaagtgactgctgtagcttttctgagtgcctcacaagggcgatgtgacagtgagggggctctctgctgatgattctgcccactagttcttacattttgtgtttctttggtttagcagagcagtttcttcccccaaatgcaatatgggcagaacatttggaatattcgttctaacaatggcccgtcaagaagtgggcagatgattttgtcccagaatgttcacacgtcgataaatatgttaatgtttaataataaagagtttgctttctaaatgttagttggctgggtgtccttgatagtaccagttttggtggtagtgggcatttgcggtgacatcacagatgtcagaaactgaagcctggtgggtgggggtactgcactttcactcacctttttgtgcacgcatctatcaggaatgcctgagtcctttcactgggaaaaaaatgtggaaattctgggattcacggggtttgaggagtggttcaggcaaatgtaaatgagatccttggataatcagggatcaaagtccagtcccaaagccagacctaggtccagacaccttcccagagtgcttatacagtagtgctcagtacagggctagcgtggaaggggaattggagacacctggatctccaatctccccctccttctgacagctggacttagttgttcctcttctaaaatcaaatcaaactccatcattattccaactctgaagggaaaaaatattgctggacagtttctctcaatttaaacatatattttaaataaatattccctccacacttgatatgtttccattgtattaccagcagcgcaggatgatacagaattgatgtaacacattgttggcttgagtatttaagttttaattcatacagttttcatgaagttcaaaagaatgccatcatttcaagtttttttcagtggtgcttatagggagcctagaattattttataagagaccatggaaatcatctagtcagacttttctctttctggataaggaaactgatgccgagagaggttaaaagacttctccggtcacaaggaaaattagtgctgataagagtcagggctggtcgcggtggctcatgcctgtaatcccagcactttgggaggctgaggctgcggatcacctgaggtcaggagttcaagaccagcctggtcaacatggtgaaaccccgtctctattaaaaacacaaaaaaattagccgggcgtggtggtgggtgcctgtaatcccagctattctggaggctgaggcaggagaattgcttgaacccgggaggtagaggctgcagtgagcggagatagcgctgctgcactccagcctgggcaagagtgaaattccgtctcaaagaaaaaaaaaaaaaaaaaagtcagaaccctggtttattactttcaattaagtatgtattttcctattgttcacaggagagtaccccagccctgaaatatctctagatagtgaggatgatttccgaaggagtgccttccccatcacaactctcaaaccgctgaaccttatagaaaggagatttgcttttctggataattatcaacacctttaggctgcagtagaagtgatgattctgtttgctttttgaaaaaaaaaaaaaaaggaagcagagttgaattgatgctgttcccagtgtctgtaaactttgagaagtatgaattcattgttttagttagaaaaaaatctacttatataggtagacctcattaaacaaaaccaatgcaaggaccgctcctcagtggagcagattgctttttgaggtagagaacattcaagcagctgctagattgatttttgtactgggttagttggcattttcactaggagtgaaaactgtgagactaaacagtttaatttacttagaatgtccctctttctctctgtgtgtgtgtgtgtgtgtgtgtgtgtgtgtgcccgtgcgtcgggggggggggcagtggtgattctcaactttctaggaatttattaagtaaagtgtttagaaatggaaggaaacaattagataattctcagtgctccaggattttaggctcctacatttgaaaatacttgctgtcattaattgtcttgagatttaggcttttccacttttcaggaaatctagtagttttttgggggttttgttttgttttccttggttctgccctatgccaacctgctagtttccctttttattttagcctgatgaatcttcccttttgctttcagtactaaccattgctggtagttcttaacaggtctagcttttaccaatattgtcaagttagcaatattagctcctggggccctagtactctgtacttccacccctctccccaccagtaccatgctgcctgttcacatgatggacaccagctctgatattcaccctaagatataatccataagatgacaaacttgtattcaacaccgactcctactctggctaaaatgctgaagagaatactaagaaataggggatatggtcctggtcatcaagttgcttagtctgattaggaaaaaaaaaaaaaaaaaaaaaaaagagatacaaggaagcttaagtaaaaatataaggggttgggcgtggtaactcatgcctgtaatcccagcactttgagaggccgaggcaggcagatcacgaggtcaggagtttgagaccagcctggccaatatggtgaaaccccatctctactaaaaatacaaaaaattagccaggcgtggtggcgtatgcctgtagtcccagctactcaagaggctgaggcaggagaatcgcttgaacccgggaggcggaggttgcagtgagccgagatcgtgccactgcactccagcgtgggtgacagagcgagacaacgtcaaagaaagaaagaaaagaaagaaaatataaagagctgacagcctacatgcttttctgtagaaatctaatattttgaagcaaaagataagctctgagtagcatttcaggtaataaccgcccccctccccaacacacacataagcacacacaattatttaagagtattatgtgtatttagaggtggagaaatttgttcctagtgtccccggaaccacacagagtaggtgctgaccaccagcttaaagactggctcagaaggaaggtcaaatgggagaaggcagtctttgagggctaacgagaggaaagaaaacacacaaggctccctatggtgtatcccttatcatgtacttcgacaccatacacaggaaggcccctgaaatggaatgtttgctgttctttatacacttgctttgggtggggacatggaaagggagctggtggggctccacagacaacaggggtagtaatttctgttcccctgagaatatcagtggagacagctatgactccaggaaggccaagaagggagagggagcttcttaaccaggctttgtgaatgggtttcagaggctggcgtgtaaatctctgaaaatgtgtgcaagacattatgtatagaagcaacttgttctaaaggaagtctgttcagctctccatagcctttcaaaggttctaggatatggaaaaggcaagcccttgctcttggatgtctgatttggtgactgtcttatgtttcagagtcttcctgttcagatcccagacagttcttgtgttttactgccattgcctctccctgtggtgaagaatggggaggaggaaggtgtgtgtatttagtaaaggttctgaggtgccgcttaatcttccctgtccctggctggcgtgtccgtccacctacatgtctgccctcagtcttggaaggacgggaagccaagtgccctgcacagggtaaatactggtatgattcattttattaatgcttctgaaaaatgactgtgaaaacaaatttatcctcaaatgttccatcatcctcaaacagttatttggatgaccttcatgttctaggaatgtatgtggtcttaatagaaattatattttgcatcaggacaacacaaaaaactgacagtcttatttgtgccagtgccgtcctcagaactttacatggattaactttttaatcctgtgagataagccctgttattatccccacttcattgatgggaaagctgaagtctagaagggctaactgcccaaggtcgtataggtagcatgggcagagctgcattcaacctgagtaaaggaggtccccagagtctatactctcaatgggtgttccatacgcccttcccttactgaagatatctataaagtatttaatactgcttctgactcacaataagtgctctataaatgacaactgcctttgttgttttccttgtaattataattacttttcttttttgtgatttatcacttgcatcaaacctcacaagcagatagggattgaagatctgaaaggccaacatggaactccttgaatttcttatttttcatgggttttcctagaccctgacaagaggtggttctctcctgccccaagaaattcaaagctttccacatcccacccttcgctggtggcaagacttcaataattacttcagccttcggactccattgtgcaggagaacctgttagaagctcttcctctgtggcttctgaagaaccatcaagatgcacaggacttcctgtggctcttttgatcttttgaaattgcaagcacaggaaggaaagaatggatagggggataaagaatagctatgattgttgtgataatagcatgttgcatttctatagagccctttcgctgatgagccctgagccttaacagccatcacactgttggcccctgcactgtgaacctagagggtaccttgagtttttctagtgctgccaaacagaattgcattgacacataccttaatcaagagagaagcaagccgtgttggcaactgtgcatcacagtcgatgtggtggtcatccatgggatgcccctaatagcatctgtaattttcaagtagatgttgggtgtaatttggtgacccttgtctgttcccactgttggaagccccataactgatctgatgaaagcataaagtgaagaagagtggcgagaccctttgtgagatacctggagctgaagagtcaggtgtggaatggacaagaatgttatccacttctaagtgaccttgttttttctaatttcttaagaaatacctgtttgcttgactgccttaggctgtttgcaggggccacttgtacgtcagcaaaactcttactagatgacatcactgccagaagttccacatgtttccaggaggcacatttcccactgcccccactcccccgaacttggaaagattcctcagttttaaagttataagtaatttccatgccagataatgatcctgtgaacagatccttttctcatgtggaaaaatatttcagaaagggtgtcttgtcaatgagaaaaatgaccccattgaaacatatgtttatttgccatgtactcatctgacgttttgtgaattctataaagccatggaagtggattgttagaagtgtctcatacacccctagtgacttcttgaactatccccccatccccagccatggaactctcctattaaaaaaactaagagataagtggtagcaatcttaacaaattagtgattttatctggttaggccgtgtaatcaaacacgtgggcaggaaagtggatccattatgttgtactcatgattgtggtgctgaaggtaacccccattgccctgtaggctgcccccagaagcagggggtacagccaatagtattcttagaagttaatcaattctgtaacgggttgagtgttttggtctcatttttagtccgaggtgccctgatgctggcctgtgactaaggggagtcagtggcttgttatgaataagaggacacatgagctgaatctgagaaagttcagaagcattttataagttgtttaaaatacatccattaaagtatatgattattttttggtaatcatttaaatcattgtgctgtgtgtctacccagacagtatttatctgtctctcgatgttgtattagtatagtattaaaaaaatacacacatttcacttttgataaaaactttgcatactgtcactactttgtataagttttttcctgactgcctctggttagggggcagggagcaagaagaccagcatgctttccttcctttatatttgggaaatggaggtgctgagagaaacaagccacactgtctgaagtaaaacctagaagtggacctggttgtccatggtgagggaaagcccatatgtaccaccttgggctccagttacaaggtaatgagccatgagcacaaaagggtgactcaaaattcaatgccagccattctcattactaatgagcaattacagcaaatatttacaggcctccttcctacctttatgacttcctgttactgaagcactttggagtattgagaaagattgtcctggaaaaatacgtcacacacagttgcaggaaagagtgcctttaagcacacataaaaactcggttacttggctttgtttatgaattccacatagaaacaacagaaaattgtgccttttgaggaactgcttgagaatccttccttctgcatttcaagacaagattttaaaaatcacatatatcaaatatatggggaaatgagacacaatgtttttagagagtgtctagaaataataggactgtgcaagttagtacagcaaaattttgggtcaaagcatgggtcatttgacaaactctctttatgaacattacctctgcaatatttttctaaatgaaaacaatcacacttaatagaattaatcaggatgggagctagaagcatataattcactttccacagattggagtaaatcctcataatgcccctttcctgtgtatttagttaaaaaagcactccagtgagattgctttcgcagtaagtttctgtaaaccactgtacccttgtatttctctcctgtgtttccaagagttctcagatgctattttcgaatggcagcgttcactccagagctggctgaggtcaacgaagctaattttggtgccttggtgcccagggtgaagggagagagaagtcctctgcagagccaaaaggactctctggggcctgggtttggagcagtgtggtgttgctggacacaccacatttcacctttagaacctttatttgtgtgcttgcacaacaaatgtttacccagatattaagataaggaaagtatgaaggtcacatttcactggtgacaagagagcttctataaatgtaaccatatcgttgtgcagcgggagtctgtcttttattctgtacccgggacttagggggaattattggtgggtggggcatgggagttgaggctcttcttggttttctggctttcttgctatcactctgtttgtcttgcctcagctgatgtgcgcctcccatttggtaagggcctttgtcatggccaagacatctaaagaaatcctagtctgtgtggctgggcactgtgtggtcccctgactctctggagtcttccagagttccatggaaattagtgcccccgtgcatttccctgccgactgactggaaggcaccctggctgctgagatcgctttcctggtcccccagaagaggtccacatggtgctgatcctgcagctgttttaggcctcctcagcgggattgtcctatcctcggagcacagagaatcttcagagtgggataggggtttcttttgtggatttgggtttctcttagggatctccaaagattagctagacactcagggcctcagtaaagacatgggtccttggtctagttttcttcccaagggcagccaccatggcagtgggagttcaccttgctgactgcaagggaccccacctcacctctatcgcccattcaccatcattcactgtgcctcctgagttcctaatacacaagcctcctcccacagcctcaaaggcagtgctgcagtactcattcccacttctattccctcacactagctcctccatctggatgcttttcccctctcttcctattcaaatagctcctacttttctattgtgagcccaggcttcccgaaatcttacacaaaatcactaagggagcgtagaaatttccacagtggcactcccactccctgcattactagcttttggttgtttgccaaagagcctgcttatatttccttgttatctaatgacactttatttgtttttgcctttctaacaatatagcatgttcctgaaggccaaggatgtctgattttctgatgtgccctaataccttgcttgcttttttttgggggggggggctctgaaatcatgcttagttttttaaaaaaaataatagaattgctttgttcatgtcccttgggttacttggaaagcctgcctcacaagctctgctttctttattcatgtagatttgacccctttacttatttccctttaaaaagaaagaaaaaggaaaagaaaaaatttgggggaccacagtcaggtcttattgatacataactttatatcagatgcaaacgtcaggctagtattatatcagtgcttcacttcaagaatgccttatacactaatgtgagtacagccaaacagaatactccagcttaatctcaacgttaaaagcaagatggggaagttgtgcaagagggcactagctctcagttcagagatcatcttccctgggaagccttccctgattaactgcacattggttacccctgtgtttatagatggtcttcagtctgtattttgttatttgtatgatgcttttacaacttgcttttgaaggttgggggtggcgtatgtccctgatcaccactcaagtggtaagcccttcaagagcaaagacccagtcattttttcctgttcttttttccccacagaagtcagaatagaggtctcttgaggtgctcagtaattatttgtagactgagtaattctgtctatgtcaggaactttgggagtttggtgtagagaactggaagcacaggtagacactttgctcacatcaacctaacttatcctcattgcttatccaccatgcgtagagcagggtttgtgggaatcatcactgtgtgtagatgtttataggttccctcccaaattcaggtgctatgctgtacggtgaggttacaaagaggcattagatggaccctgcactcaggatgtcctaaaatgatttgtttaagcaatataagatgatttatgttaatggatgtccaagctgcctttacaatgttgccatcttgttaggaagtcacaaccaactcagataaaacattgagcaaacaatggaagattgatagtaattaagtgagagtgagtaagggtaaatagatcttgtgtgttgggaatagttagggaagtgattagtggagattagagggaggtttattggaggagcatgaagacctaggtctgtcttgaagattaggtagaatttggataggcagatgagtatggggcattccatttgaggtgaattgcgtaagtaaaatgagaaggcagcaataaacagagtgtgcaggccaggactggtgagccagttccttccagggctggatctggagctctgttagcagaaaggagatgaggaccaggcctgggctggtgttgggaagtttaggggcaggccttcctgagtcatgttgtgatggaatctttgggttgccttggggccatgggagcagtgcatgcctcttctggcacatgagaagctgctcagggcatctccatcattagccctccaaccagaagcctagctctagtgtgagcatcaagtgggtggttggaggaggccatgatttgtcttctataatattgacctcaaagcctcccctgctagcccttagtaaatcaggcatgtgtgaatgtgcccaaatcactctgatatatgtttctttttggcctgtaccacttctcagggtaataaacgccatgtctgagtctcctagtgcatggagtgggagctggaagaggacagcttgctgtatcctaaaatagcagtgaccctcatccccatgttctctttctgatggtaaagactttgtccccctcattatttgataaggttctctttctgatggtaaagcctttgtccccctcattatttgataaggctctcattctgtccctttctcattctggattctaggtttttgagtctaaccattatggaaagagaacagtcccttcaatatcccactatctgtagggcatgacacagccaaatccaagtcagaccatccctttgatcaatttctaccaataactgttcattgcacaccctgtacaaagcactgcgaccaagctgttccttgaccttctcctttcctagtgtttggtcacaacactccctaaagccctaactcaagttcttgggatgataccaccagaagagggaaaaaaggagccgtcttcctgaagtcacctgggtagagcagctggggatttttccctcctcgagcaggtgtaacctttcccctggaggaatttagaaacacttaaagtcatacctgaacactgtgggccaggccttggccagagatcccaagtcactggagaagattccattccagggaccagtagaggccagcgggtctcatccaagtcactttagctcattctgtccaccggtactttgagggaggctatataactcctgagtacttttggcttagaatttaacctcacaatgacaactgcgtgtttggcctttttttttgagacggagtctcgctctgttgcccaggctggagtgcagtggcacgatcttggctcactgcaagctctgcctcccaggttcacgccattctcctgcctcagcctccccagtagttgggactacaggtgcctgccacgatgcccagctaattttttttgtatttttagtagagacggggtttcaccgtgttaaccaggatggtctcgatctcctgacctgtgatccacccgcctcggcctcccaaagtgctgagattacaggcgtgagccactgcacccagcatatttggcctcttattccttttctgtccctctagtaatcaataaatgcttgtaaaactgggaaactgctgcctggcccaggcaggattggttggttcaatgactcgctccacagtcattctctgctcattgcctactctgtgcaggctgctgagcctcaggcccgagagcagggaagggccctctacagttaggtggaaaggagcctggactgtcagaaccaggaaaagactgcaggtgccagagagctttggagcacagcgcagcccaaactaagggactagtttcaagaatctcctaagaactcccctaggctagaaagtgttgtttacccaaatcttgccatggctagaaatttgagtctagcatctaccttctcacagctccaggtggacctccagaaggaaaaggaagatgtcctaccaagctaacctgtgactagatatctgttagggtgtgaaacctgtgaacatatccacgtcttttcctttgtgttcatttccttttctcttcctttttaaagtaaaacatccttttgaaaagttccaactttgcctttgctgaactcctagcaagtacttttccccaccttggctagtgagatgttgagacatgggcacacctgagggtggtgtggtcactgtggccgccagccagcccaaggccttgggaaagcctggtgagcagaaaacccaggcagaaaggagtctgggtgactgtgagcattgatccctttgttcctgagtcatctcttttgagcacatttgaaaccattttccatacccaaatcaacataatcttggtgattccaggccacctgtatctccttgtatggctccaaatattaccagggcaatgacgacaacttaattcttcttgagttagatcttcagggccaaggcacagtacatgtttattttggagagagacaaactttcacccacttgaatttctttgcctccaaaattagcgttgggatgaccacagggttctgtgtttcttggcttttatcttgccaaacggattgtaaatgctcccgagtcaccttctctttttttgtgtccctggcaaagcctacctccacatggggttcagaggagctctcaagtctctaggagtttgaaagacttttctagatctttctctgatgtgtgtgacctaggacaggtaatttaacctttctttctttaacccctttcctaagtggggttagacatatttgctgctttctcagagtactattatgagtttgaaatgagctagagtttcataaaaccatgcatttttaaagtctattatattttaaaaatcacttttgcaactattatctcaatagaactttgaaaagtttaaagggcagaccttcaaggcatcattattaacaagcacagcaatataatcattaggcacattattgcctgttgatgtgatttggctgcagttggaaggcagccttaggaaaagctaggggactcttgctctcaggcctttaaatttcttacctggctgggattttcagaattattagtttttactaataatgatttttgggtatcagttctatttttgcccataccctgagatgtgaggaaatctgattatacccaagagaccaaggacacttccaggattctagataaagggtctgaccagttatgctcctttctacatctggcctgtttttccctcccctgtggagatggaggtggtttgtgcaagatgtgattctgtcgagaatgggaatatcccttcaactcagcacacccaaatctctaaacctaaagagctacatctgtaccatgtctgctcaggtcctacttgttgctttgcatcttatgagcaagacctaattgtgggctcccaaagaaagcagatgacttgcccaaggtctttaagaggtcagacagctactagcagagaaacagagcgaatgttgacacctaaaagataccttgtccttccggtgttactagaagtgggaaaaaggctttgagtgcaaacgcctggctgtgctacatactgaccatgagatgtgacaggccactcagctctggcctctgatccttcatctgtaacatctttgatgcccctaatgcctaagcttgctcatccctcagccccacccatgaggctggccagttaacttctgccttcaggtctcagcttaaatatcacctccctagggaagcattttctcacctcctttagttaacctccctcctgttctgttttgttttgttttagcagtacttcccacatgttgttatttatttatttatttatttatttatttttgagacagtgtctcactctgtcgccaggctgcagtgcaatggcgggatctcagctcactgcaacctctacctcccaggttcaagcgattctcccacctcggcttcctgagtagcggggattacaggcacgcaccaccatgccaggctaatatttgtatttttagtagagatggggtttcaccatgttggccaggctggtctcaaactctgacctcaggtgatctgcccgccttggcctcccaaagtgctgggattacaggcatgagccacggtgaccagccccacatgtcataatttatttgcttatcatctgtcacctttgctgccccctagtatgtaagcttcatgaaggcagggaccatgcattacatggttactgccatatcctcagggtttggggcagtgcctacacacaggaggtgctccttaaatgtttgttaagtgaaataatctgaggttgtcaggtctttgtcttcaacgttattatttcttatatttgttcagtgcttaattttttttcaaagctcttgatgtagattgaagcttttgtcatttttgtcatatagatgaaacaactgaggcacaaaaatgtgatcacaaaaccagagagtggcagtgcctacctgaacagctcccagacccagactctttccacagacccatgctgtctctcttggcaccttatttttctgtcgtggtgatgttattgtttgtcttatttggcaatgtttacaccggaggagtagaggccattgtgtgttggtggcgtctggaaatacacaagagagtcccaggagaatgccactgtcggttcttaccacaattagcaattgtcaggtcaggggcagtgattgggtcggtgtcactctctacatggctggctctgcgtgttgaaacaccactgcctgtacctccacagatgccaaagggagtgtgggtcctaggactacagccccatttctacccagccctggctatctctccactcagatctaggtcctttctgttcaggaaaacgtcctgtttgtgtagcctgctagacagcaaaggcaagtgccaatcagctggatgatctctctgggcctcagtttccccatcttcacaatggactagtaagtgggaaccagtcaaaattggctcagagatccccaatagggttctagctccattgtgaaataaatttcaagtggagcctcgtcctgactcctgttttcacatgctcccttagagggaaggaaggtggacgattaaagatgattggtcgggagctggaggaaggaactccccattctccaagaggaggttctgttggaatagaggggcagagacttggaagtcgctgttgggcatggcccaacccacttccatgacagcagcaagaccaccaccctcaagaaggaggtgggctggggtacgagaaggtgggctgcccagtggtttctacaaaaagggatagttgtgcttgcaggaggggtagtgtctccatctcctgatgccagggagaaggaggcaggctgctggggtgacggagagcaccctcaactaggtcacactgcactccctctgtgcctcagtttccacttctgttagatggctgatatgatctctgccctgccagttggattggggcttccaaaatatcaactactgcaaaagaagaggttgtggccactgtgactcatatacatgtacatgaacgtatctgaagttttcagggctgatactgatgtgaggcaacccatgcaggcaacccggaggaactgtgtccctcactctgagacagtgagaacggactgagccggaaagctgatggccgtgagaggagcaggtttgaaaatcactgaatgaagtcatgttgtacagagggggcgggggtgcatactgtgggacggaggtgagtcacagtgcataagtgttggggagtcaccttgaacttgggccagaagagtagaaatattgagacttgggtttatctgcctcacatcaggtacatcaagttctggatggctgcccactggccagagacatgaggtggacggctcccttttgctgccctgggaaggccttctgctggcttcggccccactgagcaaagtctgcttgttcactggagttcacacagactccttgccaggcctgcccagaatcctgtctcctctgacttcctgtgctcttgcataatatttccttgctccctgaatggctggccccagtgcaggagcagctcactcacactgctggaccgagggcaggatgtagagggagggcagggatctgcaaacgtcacccaggggtgctctgggctctgagggtggagggcaagaggggcagagccccctcaaattctttggaagattatagcacaaggggagttgggaaggccctgggaccatgtgcacacacatctatctccatgaattgtctctcctgtaaaattatttttaaagttgctaagttgttttcttctgattataaaaaatatacatgttccccataaaaagtcatagtaaaagaaggcatggagataaaaataaaaatcaccaaaattccatcacccagagataaccactgttaactctttggtgaacatacttttctctatatcatgaatattgatatataattacagaatacgggcatacttctaagatattgtaggttcgttccaggccactacagtaaagtgaatatcacaataaaacgagtcacatgatttttttttgtttcctcgtgcatatgaaagttatgtttatattttagcattatgtctaaaaaacaatgtacataccctttttttttttctttttgagacacagtttcactccgttgcacagactggagtgcaatggggcaatcttagctcactgcaacttccgcctcctgggttcaagcaattctggtgcctcagcacccccgagtagctgggatttacagacatgtgctgccacacccagctaatttttgtgtttttagtagagatggggttttgccatgttggccaggctggtctcgaactactggcctcaaatgatctgcctgcctcagcctcccaaagtgttgggattacaggcatgagccaccgcacctggccaacaatgtctataccttaatttaaaaatattttattgctaaaagaaatgctaacaatcatctgagccttcagtgagtcataatcttcttactgggagaggttcttgcctccatatcggtggctgcagaactgattagtgtgacggttgctgaaggttggggtggctgtggcaattccttgaaatcagacaagaatgaagttttttacatcaatagagtcttcttttcaggaaagactctgcagcatgtgatactgtctgatagcattttacccacagtaaaacttccttcataattggtgtcaatcctctcaaaccctgccactgctttatcaacttagttgatgtaatattctaaatcctttgttgtcatttccacagtgttcacaccatctttaccaggagcaaattccatcttgagaagccacttttcttttctcatctgtaagaagctctgactcatctgttcaagttttatcatgaggttgcaacagttcagtcacatcttcaggctccacttctagttttcttgctatttcttccacatctgcagttacttcctccactaaagtcttgaacccctcaaagtcatccgtgaggtttggaattaacttcttccagactcctgttactgctgatattttgacatcctcccacaaattacaaatgctgttaatggtatctagaatggtgaactcttttcaggtggttttcaatttactttgcccagattcatctaggaatcactatctatggcagctatagccttacaaaatttcttgaataagacttggaagtcagaattactccttgatccatgggcttcagaatggatcttgtgttagcaggcatgaaaacaacattaattttgtgcgtctccatcagggctcttgagtaactaggtgcattgacaacgagcacataaacatatgtgctgtcatccaggttttgttgttccactgatagagcaccaataaagtagatttggcataatttttaagaaccctaggacttacagaatggtaaatgataagtggcttcagcttaaactcaccagctgcattagtccctagtaagagagtcagcctgtcctttgaaactagggattgacttctcccctcttgcagtgaaagtcctagatggcatgttcatccagcataaggctctttcatctacactgaaaatctgtttagtgtagccaccttcatcaatgatcttagctagatcttctaaataactggctgccgcttatgtatcagcacttgctctttcaccttgcatttttatgttatggagatgtcttctttccttaaatgtgacgaaccaacctctgctagcttcatacttttcttaatgcagcttccttaccttgctctgccttcctagaattgaagagagttagggccttgctctggattagactttggcttaagggaatattatgcctggtttgatcttctcactaagcttaatcattccttaacttttgatttaaagtgagagatgtgactcttcctttcattcgaacacatagagcccattgtagagttattaaaattggtctaatttcaatattgttgtgtctcagggaataggaaggattggggagggggagagagagatacacacacacacacacaaacacacacacgcacacagaggaacaatcactggaccagtcagaacacacacaacatttattaagatcactgtcttatatgggtgcagtttatgcctaaaaacaattacggtggtaacatcaaagatcactgatcgcagatcattataataatagctataataatgaaagtttgaaatattgcaagaatgaccaaaatgtggcacagatatgaagtgagcacatactattggaaaaatggcatggataaacttgcctgacaaaccttcaatttgtaaaaagtgcaatatctgcaaagtgcaataaagtaaggcataataaaacaaggcatgcctgtgtttcttaaccatttaacacgtgtaaaactgtgctaccatttttattaagttcccatattgtttttgtgttgctgagaaagtttttgagtgttgtaccctaacctcttctttcccgtaagctctgtggtttttagttttgcatagtgtggtgatttttaggagctcatatgccatgttgtagcagaactacttgtaaattcacatgacgtgtcttccctaaattcaacattaattattagttattaatagtattaattgtgaagcacaataaaatgaggtatgcctgcattatcatgttacatgctattgtgaaatgcattttctatatagcaatatatcagaactatctcttgctactaagttacaaagatttaatacatagttgtattaagttccacttatagaggtatcatagtgaaacccttattcattgacatgtccaggctcagaaaacaagctataaccagcccaagcttattttcagacctgaaaagcagcatcttttctatatttctgaccaatgtgttatctgaaaagcggcatcttttctatatttctgaccagtgtgttagctatggtgccccagaaatagctgcaaaataaaaggttaagtgccatgtaggcctttctctaggcttagaataattcacttgattacataggaagaggctgcaatgatgacagcttccagggctgggccagaccttaccctgggtaaaatgatcctccagtgtggcccatatgtatgctttgagccaggagctgctagctgggagaacaagtttttcttcagtggtattcctgtgaccaagatttcaaataagctccatttttaattttaattggttattgtcctcctgaaattttatgacacaatctatatctttaaaaaggcactctttcttctttatacagttgttttcatgatgttaaaaactttaaagaaagtatcattcagatttgctgacagttggaagattattttaaaaatccaactagtttagctgaaaaaggtgctatcagtgtttctgtctcatccttggaaattgtatatttttaaggcttgtgattagctttttctcctccattgctgatcgtggttggaagtgtggcatagatttacagtaaactttgatataatggtgattcctctttgttttggagccaggtgcctgcggtatttgcttattttctttgattcatttttaaattgagttgaatgtttgatttaatcagaagtgatagtatgaggctggggatgattgcttgtggttgggaattgcttgtaaagtttactgtttagtcaagacaaatcgtttcctaaagctctctttttcagatttcttgtctatgtgggaaagcatgataatgccagtcagtttaaacatatttaagagttcccaggcatcttcgaacagaaaaatttgcaacaaaatttggcaacggcagaatgcgaggatttttgcctcattttgtttatagttgtctgctcttcaggcaaatgatctattacaacaatctgaataattacagtctctccttcaatttattcaccctggactcctttttctagaattactggccagactcttattacaccaaattccttgactctattcccgaggaatgaggatgggactaggagtaaaagttaaagagagaaactaattgttgcctgcttttcaaagttttcggtgtgtggaaatttgttgattttgtaattgctcccttagttggtcattacccgattctggtagggtacttgccatgtgtacacatttagggagtgcaaagggacagtaagacttaattggtcctgggaattgttgaacaggactttgttgaaatggctacttctgtacaatgcacatggagcagctgttggcatagcaactcctacgtggaaaagtgcacgccgcttgcagatgacttttgcagtgctcagtgttaatttgataaatggcttttctaatagcagtttgtgggctaatggaaagatcgaagcaaaccttcattaacggaaaggagaatagggattttgaagccactgggtgaacacactggacagccagagctaaatctccattttcagctgtgtctctttttcacagcagatatgcttggagtgtggcagatgaaagtaaattaagaaaactgtctgcccgtgccattatcatcttagattttaagcagggagaggttttggagtcctttctattcaagatacttaactttgtgtgagagtttagtttaagagtactgtagaagctttgcattgtgttgtcgttttcctttgctggtagtggtggggttaaggtggttaaatcgttttttattgtggtaaaatatacataacaaaaaatgtttaccattttaactatttttaagcctgcaattcaatggcattaagtacgttcatattgttgggctacaagcaccactgctcaagaactttttcatcatctcaaatggaaactctgtactcattaaataataactctttattccccacatgctccaatccccgataatcactattctactttctctatgaatatgactattccaagtagattgtatatatagacatataaagtatttgtccttttatgtctggcttatttcacttagcataatgttttcaaggttcatccaagttacaacatgtattcaaagttttatttctttttaaggccgaataatatcctattgtgtgtagacactatattttgtttatctggtcttctgtcaagggacatttgagttgtttccacctttgggtgttgtgaatcatggtgaacatggtgtacaatttgagtccctgctttcagtttttttggatatagacctagaagtggaatttctggatcatatggtaattctgtgtttatttttttcaaaaactgctgtactgtcttccatagcagccataccattgtacattttcacgagcaatgcataagagttccagtttcttcatttccctgctaacacttgttattttctgttttttgttttgttttgtttttgtttttagatatcagccatcctagtgggtgtgaagtggtatctcattgtggctttgatttacattttcctaatgatcagtgatttgtctttataaacatattgcctgttccttgccccccaccccacccccgcacccccacaacagcctgtgtgggaatggaaatcactgccccattgtttacacctgtgaggcaaacaaagactatcaacataatgatatttgggagtgaaaggtgtcagggagagaaggatgaaggcaccataaggttattatatataataactggcatataggatatagtacaggcacctcagtagacctattttcagttcgtgctgtggagcatgtgaaactattttaaatagaggcctttgggacttaagtaacttcaactctctgaatgaggtttaaggcaagcttgctgtgggctggatctatcctgtataatccctactgatttgggtgatgtataggtacccttccctgaaattcttccctgagaataattattgttgtcatctactacggaatcctgggcccactttcttccttcttcttgggggaggaaatctcccagacatcttgccaagcatttgcttaagtctttgaaccgctgcactagctaatttctccacctgaaacaatatacaaacccctcctcttctccacccgctaggttcttatgctggcagctcatatttttacaagaaaaagaagttagaatgtattgagcacctgctataagcctggcactttgctagtcactgtgtggcagatgactacatcagtcatgactgataaaacataacttctatccttgtaagtgccgcaggacttatttgtgactcttaacaacaggggttccaaaccttagtgtgcatcagaactgcctggggcttattaaaactcagattactggacctcatccctagaatttcttactcggcccgcaggtctgaggtggagcctgagagtgtgcatttctaacaagttcctagatgatgatgatgttgctcatccctggaccacactatgagaaccactgctttccatcaagcctgtgaaatagatattattcccatttatagatgaggagctgagatgtagagaggccaaatgacttgcctcagttcttgcacacagagccagagcccagatttgaagctgagaggcctcactccaaagcttctgctgtttccattatatcagggatggcaaaggcatagataccacctgtgcttccctcacttagtccacccccacgacaggcaatattaatcaatcacagcacctctgagcccagagatgtcctcggaatctttcacacactgctcctgacagccaaacctacccgtcagtgggagctgaagtttgcaatttctgtactaacctgtatggcctttctaaaatggagacattaccaaggaatcaatctattaacagctgaaaacaaaccttgtgtgagctccagtcttatctgcctaggagggaagagcgtggtagattgcaggctgtgtgaagcacagcactcccatggcgacctcacggatcataactagagtctacactcagcacacaggcaacacagggccgttacccttgaaaagtgtaaaaatctagacgaagttaatgaggagactttttttttaagctgctatattttgtctaattcatatatgctacattttattctaaaaatagttattctactctttggcactaagtttggtgatggatataaaatagtgatcaataaacagttgttaagaaaggaaaaataaagtaggtgccaaaggcaactgtgtccacacctgatgaggtcttttaacaaatggatgggaggaataaacaagactgaattatgtttttatatatcttgcgcacccaacagttcttagcaaggcccgtgggcagtagatgcccaataaatatttatcatacggaactacaaatcttgcttgtgaaagtacaaagcataggtgtatcctggaggtagggaacagtaaccctgagagcagactggtttaaggccatctctggccaaaccaaaacacattacagaggctctctgagtcccaaagtcatccacagattgatgtcttgcttctcttcttatggcataagagactggtagaaaactgaccaaactcatcaagaaagtaatatttttttttcctctgaaaattgtgaattgtatcagatattgccactattatgcccctaggtcacttgctcatctgttttccacagggaagccaaaacagaattttgcaaagatatacatgagtaatcaaaggaaactgactgtattgggtgtgattctcctgtcttctgaaataacccaccatgatcttttgcgtgtttctgccagcccatacaatgtctggtctcaccaccaacaacaaatatttagtctatggctactgtgtatatagggcaacctcttgtctcatttgctgtttgtgcagcttaaaagcaagggcagggtgaattatggtttttttgtttgtttgtttttgagacggagtctcgttctgtagcccaggctggagtgcggtggtgcgatcttggctcactgcaagctccgccttctgggttcatgccattctccttcctcaccctcctgagtagctgggactacaggcacccgccaccacgcctggctaatttttttgtatttttagtagaaacagagtttcaccacgttagccaggatggtctcgatcttctgaccttgtgatctgcccacctcggcctcccaaggtgctaggattacaggtgtgagccactgcgcccagccctaattatgtttttatatgaattgcacaccccacagttcttagcaaggcccatgggcaatagatgcccaataaatatttatcatccaaaactacaaatcttgcttgtgaaaatacaaagcataggtgcatgctggaggtagggaacagtaaccctgagaacagactggtttaaggccatctctggccaaaccaagacacagttaaagggagcatttatgtccctgtttggctgtgatatgccctatagactggggcaaggctgtggcagcctggccaggatgaaaacgctcatccttgggctgcccctagatgccaaactttttccgtacaagttttcaaggcacattattaaaagcagttacgtaagtggggaactaactgcaccttataaaaggcttaacaggagagacagagtcctccatttggagctgttttgttaaatgttgagaatagagaagtccagaagtggttggtgtttctgctctacactgaaaacgaattgggctggagcccatctcacagcctgcctttctttcttctatctcacccagcttgggcacaggcttttgctatactgttggactgggcagttccccattgatagagatgttgtttaatatttaagtatgttgtgtagctcttaacatcgaaagagaagaaaaaaggtccagtttatctttagggtgagctgacctttccagatggagcagggaaatctcctgaggacaggaccctgggaggaatccacttccctgcttaaaaagcatggtgaggaaggttcccttgggcttgttggatccagtactctccagtgggcagtgctctgtatgttctaggttagagtcttagataatatgggattttaaaaccagtattgtattacattagagtattactgcccttgggaattttttagatagttccttttggggagagaactgttttgtcctatccattgcagatgggagcaagaacatacaaaagagcataaagaaaaattctgccgatgtgggcatttccttgaggctgagggactaggagaggcaccaaagggtgtccttcattcatggtaaaagccctaatagcctcagtgttagaatatcctgtaggcaggcgaaggatgacatgactcactttggtggtgacctcctagtagttcaactgagaatccaggcgggataagatcagtgcagggtaattgtatggtagctagtcaacctttccattgcttagccggagaattctggcttttgtgctggtgatgtcaggcaggtgttggaggaggagttccatgaccattttctctgttcctgccaacaggaaagctccattgggacatacacgctcacttccagggtgttttatattcatccatagctgctgcatggataaaaaatttggcgaaaaacttgaaatcctattaccatgatgatcattagaactcatgttagggctttttgtttttaaaacagggacacaaagaagaaacagaaggctgccatatgcaaggttagtgaaagccccttaccttcaccccatttaaatcctgaagagggaaagtagctaagctgtagtgatcacttcctgcaaagaaaaccataattatggcgcccagttattcttcataaggggaaaccttggaatagcatgggtgctattttgaatatttgagaaaacagtgacattcaatatgaaatggaaatgattctgtgctgctgggattggatcagttccttctaggcatcagttgcccctggggatagcctagttctccctcctgtgtgaatttgggaaacactagaatcttgtagttgttgctgactctcccaccagcagggaaccaacttatgctcttgggagaagcagggggagtggggaatctgcttttctctttaagcttccaatctcaactgcctaataacaagggaattcgactatcaagatttcctggagtggcttaagtatgggcgccaggatgcagtcttctgtacacagtgaaagaaaacgggggtaaaaaccatgatgaataggtgcagagaggagtggctagatcacctgcctgggggatgagcctcccacgtgactgtaaggttgtgcaagaattgggcaacatttggtcagggtggagaggccttgacaaagcatttgtactcccactagattcctatctcctccgtggggaaaaacaagtatttaaagttctacacagtgttttaagaggaagaaatggattgccttactaccctagcatacttcatttgtacatatttggagttctattcactaagcacccactgtaggaagggcactgggctgaagatcccagaaaattaaaggagacacctttgttcctgcccataggaaatatagtctagtgggggccaggaaggggtaagacgagcatacaggtgatcatactcaagacaggagatagtaaataccctgatatggaaatagggaaaatggttctaggggttttggagaggagaagtgagagggaggcggtaagcctgcaggccctggagccagactgcctgggttccagtccgagatttaccacctatgagttgtggtatcttggagaagtcacttaaacacattgtacctctgattcttcaactgcaaaatgtaggtcactgttgtacctatgtcagtagataatggtttactgcccataaacattggtctcagcttcaggaccagcaggggccgtgctgaccttgagctagtgacttacaacctccaggtctcagtttcctcatctgtacaatgaagagattagactggataaatgctaacattttctttattctaaagtgccgtgatttcatggttgaatatgtattaaatgcctgctgtgtgcccaatattgtgttggcataatgaaaaagagaaaaagtaggatatgtggtccctggcctcaaggagctataatctaagtgaggagaggacattaatatacaggagagtattagagaattagagaatattagaaattaaaagctaggtggtatgggcagtgagaacataggaatagagattttagaatggaccagagtagtcaggagatttgatagtgacctatctaatgtttagaaccacagagactttagacaggagctcagacttgtttacaaatcccatgaattctgaagcttggaacactgccattaatatttaaattaaagttgaactgcagaaaaacaaaagttacctatttggaatataaggtgggacaaagtttataaaactccatgtctaaaaccggtagtgtggatggaagctataaagaggctcaaaccagcttcccatatatccttggatgacaattccattagaatatagcccctggcacagagtaggcacacacaaaaattcatctgttgagtgacttgtggaaaaagtgttctgccctgttcagctttgaacagctgtgggcaccctggtggtggtctcagccccacctccagagggcagtgcacagaggaggccccgccagagccctcctgccaagtctttgggaagagcttaatattgcctcatgcctcctgagccagccctctatcaaaggtgaattctctgctcccaaatgttaacctacctccgggggggctacacgtactccctccccagaattgtctgaacttaggttttgagaaaacttggcaacagcctcaaatttttcttccagtctaactatcctatggtccccagagtccatatgcagatcgggctgttagtgaccctggcttacacaggtaaaaaagagacttaacaaaacttggcagagactgctaagtgccaaaagagtggtgtagacagtaagtgaggtcaccccggccaggaaattgggggcacctcctggaaggagggagagctaggagcttgagtgggtcttgaagaatgagtagaggccacgatggcaggtaagacaggtggaggcattaagtacttctgtccccatgaccagttcccccataccactcttcgttaaccaaacatgggaggtggcaggcccatttagatctggtgctttattctaagggaggaaatgagatgaaaatgacagatgaagtgcaagcttgaactccctggcctcaaccagtcactgagaatggctgcccatcccccaaacagtcagtgatggcctggtttgatgggcctgtttatgacctcctggcttgagagcagcagaccacaaaccttcacagagctctctgttgaatttccttcccagtacagaacccagaagtcctagttataaatgtcactacactttatttatgtagcatcctctgtgaaaacatgagtatatatcatatctaccatcagaacgtaccttcagcaatcacttagaacagtggggaggacagatggggtcttcaaggttcagaaaggtgaaatgtacaatatcttcccattgtaactcttcagagcaaatcagaggtgaaaatgttcagaacacaagtctgccttccaggccagtcttctaagcacctttttcttctctttcacattttacccttgtctcattccctgttccctcctcctttttgttcataaaaaaaattatttttttccaaataagcaaaatggagtcaaactttgcatcctcaaaatgtatgaagtaaacattattcctaatgagcctctgggaaagtgctcacctttgaacttggccaaggattatgcagcaaagaaaaagtcttaagaacttgatagagtgttagagcttcctgggtttttaaagtcaagttgcatattacatttcttttccttaataggggcatttccagaaacccttcctggttgagtaggccagtgtctgaaagtgaagcgctaggattggttactgactctggttcagggattgtcatctgggtgcgaggcaaccacagggtaggaggcaccattgctagaatgctctttctttcctaggactcagcacctatgccgacagtccttgcaagacaggaggggaacgtgtaggctatcctatttatggtaaggggaggcctatggaaaaacaggaagatggtcaagggaagctggcagcaaaaaggcaatgagaccgaggagttgtccctgtaagataagctcttttccccttggagaccttgcctattaattggcctgtgctcatctctataggctttctattaaaacacacacacggccaggcgtggtggctcgcgcctgtaatcccagcactttaggaggccgaggcgggtggatcatgaggtcaggagtccgagactagcctggccgagatagtgaaaccccgtctctactaaaaatacacaatttagccaggtgcagtggtgggcacctgtaatcccagctacttgggaggctgaggcgggagaatcgcttgaacccgggaggcggaagttgcagtgagccgagatcacaccactgcactctgggtgacagagcaagactccatctcaaaacaagcaaacagacaaacaaaacacacacacacatccttcttaaagacaaaaacacctctggctgtctgcatagcttctgcctgcctctgtggaatattacacattttaaattccccaactattgcctcacagccaagaagttcacttataggcattgagatgaatcattcacagaatgacttaaatccaactaagaatgtgtaactgctgaacattctgattgaggttccagaccgtttgtgatgccacatgtttgttgtaacaggcagaatcatcagtaatactttgtttctcttttcttgaaactttccctccaagtttccatcttaatgctttaaatcatgacagaatcaaacaagctctgtgccctctgcccctgacccccgtgatggcatgagcttcaccaagcacccccattcccacagagatctgggataaaaggctttacagaatccagaatccagctccgtttctgagctgttatcgcttcatagcacaggctgtctttttctcttcctacacgtagagctaggcacacatagatgggtagtgcactgtccctgaactgaggctctctcaagtccaggctaccttctgcccagcacctacttagtgtagcttatcttttaaaataagccatcctgcaaagagcagggttcccagtggccttgaggtttgtcagaagttctctagaattggcaacttagctgtgacctcagaagtcttggctctggcaaagcaaggtctttgcgctaaaacaggctcagtgcccatggagataatcacctcttgtaatatccacacaatcatctcattgtcaaagcacaaggaatgcaaaaatagaagaaatgccacaatagggttgccccatggttcagctaaaccaggattctgcttccggctgagggcaccttgggacaccttaggagggatggtcccaagcattgttctggagttcagcccctgttggcaagacctgtcctcctacaaccatagcctcacggggcctgattttgccccatctttttgggactcctttaccacctccttgtcctggctaactctcctttgtccttaaattcacaactggggaaacccttgaggagtctttttttttttcctccccattttgggttatgtcatctttcttgctcccagagcacttgctcctgacttctgtagcaatggcctcaacactattgagtgtgtagtatttcttaggcatggttctctgcatacatgtatatattatttattcctcacagaggctctgtaaggcaggcactcatagacgctgaggtttagagaaacttaagtaacttgccccaggtcatagagtaagtgtccaagtcctcaagcccgggcagtcctgctgcatctgcatggcacatgcgcttggcctggtctgctcagtgtgtctccctgactgggctgtcagttcctggagggtagggatctgtcttcccttctctatccccagtgcctggcatgtagtagacactcagtaactgtcaaataaatgaaagccctggctcatcaaacaaagaccagatgtgatttaaattccaaggagccatactttttacaaaaatgctaaaatgccaagaagtactttttcattaaaacaaaacaaaactgttttagctatgtaagggtggccttttagaactctgactgctttagatctttcctctaggtggcatagagttgtggggtttggcagaccaccatgggaaaagaacagatgcatttgtcagaatctctgtggccatcagacgtcactccaatgaagccaaagctccgaggtttaaaaataattaagggaaataactaagcggagagacagaaaagaccacttcttagttgattctggaaaaatgaaccttttctttctaccaaccggcaccgaaattcagagtatcctggacacagctgagagactactcagggagagccactgcagtcacaccccacctccacttaggtctccctacactcactctaatcttctaaatcgtttaatcagacacggcgctgcctctgaggcttcaggactttcaggctgtttttttttccccgggcttaaagtctttctctgctgctgactcacatgttaattattgctttgcataaagtagaattagcagtgctcctgcactcacctgcctgcgtgttatacaactgttttatctgctggacagaactgagtgtgcaggccggcctgccatggtgtcaccagcggccctgtcttcagctgccagggcaatgagcatcgcacagaaaccaaccattgctttagaggctctggggaagaggctgtggggtgtgctctgcttgtcccaggaaaaagagggttaagtgccaagttttgaccaaaatcttataagaatggtccaggagtttcagttccctgtcacctgtcagtgttaatggacagaactggtgtttcacagaaaaaaaaaaaaaaatacgtgtgtgtgtgtgtgtgtgtgtgtgtgtgtgtgtgtgtgtgtatcaacttgttttctctttggctgctgggctggataatgaagtaaagatgacattatctctaataaaagtgatttgcagaaatcactgacgggacctcagtagcagagattcgccattagcaggctagccagataagaggggcagctgggttctgttaaccccctcctcgtctgatgtgtgtcttgcagggaagtcaaaggcggaggagtagagtagagtggactttttgaagtttgggctaatggacagtgttttttccaaagtgtgggctgttctttagccccacttgctgatctttagggatgtcattaggttttcatttttgttttgtttcttaggatttttgtgttagtggctttttccccctggggcttggcccattttctcacctctatgttatatcaccagaagggtggaaccctggccaagccctggcatcctctgccagaaatctgagtccaagcagggcacctacacatgtgaggtgagggctctgggccacgggtgttgggcaacagattgttctgtagtgtcgaggaggtgggatctgaggcagaaacctccctggcctcttaaggatgggacgggtcaggaggggaggggtctgcccttgtccggacttgttcacctgtgtcagtgagagctgactagcagctggctcacgaaacacacccatgatgtggacagcgggcacagccagctacttctgtgtgaaaacatccttagtatacagggatttgtttcctggggacagtgaggagtcatggggtgttaagcaacctagtgatgaatatagccaccatcactcgcctttattaatccactttctactggaagcactaaagcattggaactctgcaatacccccacagctgggggaccgtgactgatttaatcttcatgccagctcaccataccataactgaaagggctgtatgacactattattgttggagtaaggtactttgatacatgagaggtttgacattttgcctgtgccctcagagaaccttaaaactaggactaacaaggtgacggtgccttgcagtcaagtagcacagattgtctaagtgttccaggcaggagtgaggaggagacaccagtgtaggctcggtaagatgctcagaaaagcctctgtggaggtggcaggcctatgttggctctcaaactttagggtttagaaggtcagaaaggaagaagcacttcaggtggaacaaatcaactggggacatggctgggcagcagaaaggggtgcggagtttgggggtggcagggcatagtgtggtctggctggagtaagcgtggagctacaggatcgtaggagctaagtttggaaagggctgggagacctcaaggagcacgtccagcttggacttcatcatgaggatggtggggagcaattttcattttaaaatgggggagcgacaagctgaaaatggttttggggaaagagtggtgggctggcgagctgttccttgccccaagatctgactcaaattttattcttggtcagtggtaaagaaagtgaggggcaagggaaacaaacagaagatggggactaaggtctgtggaaataaataaaacaccaccagagccagaggaggcgtgtgccctgggtgaagtttgtttttcatcccatgggtaacatttatgagttactgttcagcaagaatgccttgcggaggtctctgtggactgagctgaggctccagcctgtggcagcccaggaattgctgccatatttagagcttccaacagagggtttcattttccttggctttggtgccaagaaaagaggggttctcacacttgctgtccagcagggccaaagcatgaccagcaggaggagcatggaggttgggttctggcactgcccaccacctggcacctcagccactaatcagacaacaggctaggcaattatccgggcatctgactttagctacctgtccttttgtttaaagccctttcgtgtgcttggcaccttatggatactcaacaaggtctgtttaatgaatgcgttctccccacccagattctcaatgccttgctccctgttctctagcctgtctcccgaccactggcacctctgcccattcccagtgtgtctttgtcatccctctgccatcctgattgcctccctgtatcctgctcttctttcaaagccaacctccagcagagttctccctgtcttctccagccttgcaggctttctcctcccaaactcctacagccctgactgttcagcccattcttcaggacttggctcttcacctctctgcaagctccctgaggtcaggcatagttgttccacatttcattctactgctcacagccccatcgtaggaagagagaatcattaatatatattgaatgagcagagggaataagccattgctgggggaaaaatacagttttatttcccaaattgctcaatgttatttgagagcatgataataaatttggaaaagacttttagcatttcctgtggcttttgatgacttctttacaaaggaatggaaatgtgcgcagacatctcacttctcatcagagcaagagagggcagaattgggggaaagcaagtgttcgcgctgtggcatgaatcagatcccacaatactagacatgtgaccatgtgaacaggcctcagatcaggattctttataaaggaagcccaggacagattctctaccagctctctcctctttcacttttcctctttctttgctttcctttttttaatagggaggggagaaggggttatgaggatgggggtaggagagtgagggatcccgtgctttctcccccttctcttgctgttttgaaatactttaaattccaggaaccagaagttctggcaacatgttgggattagtaaggcagatcctaggatatttcactattagcatgtgatcaagcatcagtcctgattaaaagtctaaacaaatgttttctttgaaattaaagtgtctgaaataaagaagagagaactgacccttaaaatcatattctgtacttgaaaagagttctgacaactgtctgtcccggttatgtgcacccccgccccccacccgcctttttccatccagaatgtttgacgacactgccaggggaatttctgccccctccttcctgtatatacccagtgctggcctctgaggcagtccagctctgttttctcatgacacagtgattatttttggcattgcagatattttttctaatgttattacccagcccccttcttggttgccttttgtggagcaatcttttgggtaactccctgtaaatttgagggttaattttagttcggtgtggtagaggaggcagtgggagagaggaggaacgacttctactccgaagcgccccacccccaccttaagaggagccggagaggtcctctcacgccctgctcatgaaagagcttgctttcaccagctctgtgctcaccattcatcctttctgccggcgggcttgaggatatggatatccagaggtgacgctgggggctgcacctcggggatggcatcttaatgacttgacttggcgggtgttagaacagccccattcagagtgagttcactccctgcgcagttggctcactcggcctctgtccatagagttctcttgttcacgctgcaggaggaaatggagatttccaagtgggaaggagccttcccgatgctttaactcttcactgaagggaagaggagctgcagagagcgaaataaaatctaagccgccccagctgcagcgcctgggagaggagcaaggctgggctggggatggaggccaaggcagctgggatcactttttctttcctccttgagagggaaaggaaaagagcaaagggcatttttgattgtctttcacaatcagcaaatatttacccagtttgtctgccctagcccaggttccactgaaggatacacgaaagtggaagatgttgtgtctgtgcccttcccctggtacttacagcacagttataggagtagaacgtttgcatagaaaagccaccaagacagggaggcctttaataagggcctatgagtagtgtgggcaggaagtaccctggagaatgttgctaaggggccagggacactgctggaagaagtagggcttgggctggtcctaaggggtgggttttgaagaaataggaaggaataaaatgatacaggtagggaagacttgaaggaggagagggacattaatgtagggcttagtaaaatcccataaagaaagctacaaagagaacaggattcttcctggccagagagaagattggacttgttggactttacgtgcctcagattaggatggcagcaggcagcactaaccctgccagatggcatcttcagtctcaagatcgcacgtgttcctgggtctctttctactcaaagtgtgaggtcacagactagtagaatcagcatcctctgagggttgttaggaaggcagaatcccaggcttcagcccagatcctactgagcctgcactgtaacaagatccctgggtgattcctggccacagcaaaggttgggaagtgctgctctgggtgactccacaggcagctgtcagcagcactagttcagaccccagatttgattcacagaggtgacaaaacaccaacagacacacacaccttgagtgtccgcagggtgactcttcccagatggaaaccgtctattctaattaagagccgggttagaattcttaggaaagatctagaacagtgagcagctttgaggaatccacagaactgaagtcattgacgtggtttttatccgatgtctccagtttgtaccactttgtactactgatgctttagaggacaccaaaagaacaggtgtggggttctttccctgaagagtatgtggtctagttagggagacagaagccacagaagtgaaatcaaggagagcaacacagggccaaatcgtgcgtgtgtaacctctgaaatgggacttggaggagaagtcagtgcaggtgaggctttcctagggaaacggatgcatgggagatcttgaaatatgagcctaattcagacaggcctgggagatggagagagtatattccaggcagggagtgggaggggcagcagcagtagctaagtcccccctagagactgaagtggggcgggaaactgctccccacttgccccacggagtttgcttcatgccgaggaatccgttttacatctcaggccttttcttcttgattcaaccgccgtgcaatttctttgtcaattttcttagctgaaggcagtgttgtaggaacaggatggcagcacaggcagaagggtttgagccaaaccacagatggtgttgttggaagcttgtgagatccaaaggaagaaggctgctgatgggtagaagccctaaggaaaaaaatctaaatcagatctggtaacagcctgggtgtggggaaataccttcaagcccagagaggtggcaccaaagaaaacagtctggtgagaaggaaacaacctgtggcagctgtagactccgcaagcaaagcacaaaccttttttttttctttttcttttaaagacagacttctccaagctgagaactatcccaagggggctggtgtgccagctgaggggctggcctcaggcaaaatggtggccagcgtgtctcactttgctgcttcccagaccaagtgtatgtttcaaaaagctcatcagatttagtatcctagaaggcttcaccctcaagatgcccagctcagctaaatcttttgaacctgagggacttgcttattggccttgtagggaaggtcacccaattacaatcaagaatatgggatttagggtcaaatgatccaggtttgagtgctggctccatcactgggtgatggctgggcatgccactaacatccttggggtctgtctccttatgtgtaaaatgggagtgatacacctgctctgcaagattgattcaggattaaacagaagcaatatgctgagagttctttactaactggaaagagtcacatgtggttgtttcctagttatatagtcagtatctcagcttgcggaggttaattagtctcttagctgaaggctgcatggtgtcaggggtcgggcagtggcagacatcagaggccacagagagcaatggagagccacgcaaatgcctcctgcacccgctggctttctccctgctttttcatgagtgaagacagcaccgagtcttctctatacatccctgcagtggataagatgaggggtgggaaagatggaaagaacactttatttttacagtgggggaagaggtcctgctcatcagcaagggtggccctcttctcagaactggattagagtcaaaggaagccaccagttttagcacagctggtcttctcttcagatgctttgacctgcgtatgcatgaggaagagaagcagcctagagagagctggccatgggaaaaggaggctgagcctggttccaaggctgagactgttgcatgttctgtcttccttccctctgatactgccctctgaagcaccgtgacccatgctttgtgctcagtaatgctggctgtggtcctgaggatgccagtgtagccaaatctgccaactcagctttcatggggtgggggtggggtcactgtgaggtggctacggggagctggcagcaagctggatacatatcttttattgtaagaagtaagcaatacctgatgccaaggtagttgtcatggcattatttataacagctaaaaattagaaaccataacgaaaagcaataagggaatagtaaaatgcattgtggttcagccacatgatgtgatattgctggctattatgaatattttgaaagaattcttaatgggatatcctgttaagtaaaaagagcaaagtattaatttataaatccaatgagatctcagctcgttttcttcatacctttttgtatttttgaagttgcttatactaaatatgcattacccttatcttcaccacggcatttttaaaaaggaaattatgtgttgggaaaagctaggttatatgatggacagataatgaaggtctgtttctaatcgtgccacatggccagtgctgcttgtcagcaggcgctctgttcacagggccttgaaaaagccagaactcggggcttttgttccagttccacatactcccattacctttctaaacctcagtttttccttatctctaaaatgggaatgatggtagctgctcttcctagcctactgtgtgaaatttacaaatttagttacagatttccagattcactcacgagtgttttagactgtagtgtgtgatccaaatgtaaagtggtattattcactaatatgtagaataaagaatgccccactgtcttagcccatttgggcagctacaacaagataccgtaaactgagtggcttataaacaacagagtttcatttctcatggttctggatgctgggaagtccagtgtccaggtgccagcagattcagtgtctggtaagggcccactttctggttcatagctgtgtctccacatggtggaaggggtgagagggttcccctgggcctcctttgcgagtgcactaatcccattcatgaggacttcactgtcatgagttaatcacctcccaacggttccaccttcagataccatcacattgggagtggggatttcaacataagtattttgaggggacgtaaacattcagaccttggcacccactaaggcttgggcttgatgaagctaagcacagggacagttcattatgattattcctgtgtacacacagcttttcccagctgggctggggagtccacgtgtcctccggttacgtaaggagctgggttatctggagccccagatgggctgcttagtaatcgaatctgctgctcttttctacaaggctgcctggggctgagaaggccagaagataagtatctccagtcaacccaagcagaattgaccattagagggccatgctgggtgagccccagacattactgtcagcgctgaatgcagtccaggccctctgctccagggacacagaccgttagagtaggtcagagagctggaggctcagccccagcggagcggaggttgggaggctgaggtatgagatgctttccaggattcctctttcagggaagtggcaagtgaaagcatttgtccctgttttaaccactccagtctcatgtcttctctcttctttgtcccctcttgtagacttttgatatactagtgtggattattagtcttatctcccagatgggctgtggtctctttcaggatagagaccatgcccctcaggagaggtgtgtgtattaaagcatattaatgccttttttctcttgtcaaagtctgtctgatctggccagctcctcctgaatttgctaatttaatattttccattctgaatttgtaactttttgttgttttgctttgagatgggttctcactctgtcacctgagctggagtgcagtggtgcatggctcactgcagcctcgagctcccaggtcaagggatcctcctgcctcagcctcttgagtagctgggaccaccggtgtgtgccaccgtgcccagctaatttctaacttttttagagatggggtcttgctgtgttgcccagctggtctcaaactcctgggctcaagcaatcctcctgcctcagtctcccaaagtgctgtgattataggcatgagtcactgtgcctggcctattttctgttttcactatctaacattgatacctttcctccctttgtgatagattcccctactgatccctgcagcctttggacatcagaatgtacctagaacactgaccactggaacactgccttcatctcaaacatttttgtcactcctttggaatggccctcacagccaagaccattcttttcaataccttcaattgtggcaaagtcttatcttttgagggcacattttatcctatcaaacaaccacaatccatccacagctaagtctggtgactaacggggtgggtaaactggataatattgtttggggtttgaaatgaggtgtgtcctttgaagagttgtgactgattttcttatgtggctctgaagttaattctaaaagacttcccaaaagacagagcgatggccacctaccagcataaagttataggcttctcccaaggtggcttctttgaagggtagccaccttctgtgtggcatctatttcacatgtctcattattttcatctccctcttcctattagccatagcatctggtacagtggtgatcacaccaactcctagataaatgactgtttggcttatgatggtgacttcaaatttgctggacacagtgaatatggacacagtgcatggtagagggaaagagtgtggttaggttttggaagtggacctgggcgtcagtcttccatagacacatgatcacaggcctggaaatctatgttttcataagtcctccaggtgattctgatgcaagctaaaattgagacccacggctctgcaaaactggggccaataacactgcatcatttaagtgaggatcaaatgagaccatttattaaatgcatctggccccagtgctcaataaatatgtttccttttcatcctactctttgagaaaggtgacatagctgtttgcatctccaaaaacatttaagtccaaccccatctgcctccccccaccacacacacacccacccatccatccttcctttaaaaactggctgctttggaaccgtggtcctcagccctggctacacgtggggagcttttaaaactcccattgcccagcctgcacctgagacctattaaatctgaatctctggggatagagcccaggcatctgttttttaaggttcctctggtgactccagtgagcagcaaaactgagaaccaccgactttggttctgccccagttaagtatggggaccagtgactctttctcatctctggaacctggagctgggtgtgtttctcctatcaggcagcccctgtacagcagccacaagcctcatagaagtgtcactagacctctcccaattgcatttgacctttatttcctccattctcagcttcttgcaaattggctccagcttggaatttcaccaccaaccaatagactgatcccagctggcttaattagcctcagtcatctctttacctgctgaaatccattctgtttctaagccatttaaccttatagggtaataggcatattgttttgatacctgaatggccacaggcattaggcatgtgagtcctaatcactctaaaagtctagctaattaggcagccaacccctctgtgttactggtgacagacatcttggggcctcactccaggctgtgttcatatggaagtcaggaaccaagatcatcttgaccaagagcagatcatccttagattcatgacctaagtagcgatccctaagccatgctcggagcaatgacctaaaagttaagatgtttttaagataacgaagctctgggcaaagaggtttttcctggatgaactgtagcatatctctgctgacaatttttggacatttcagttttgttttatcttttgactggctgcctggtgcttaagtggttgttaactttagctgggatcaaacgtttcagaatgtgagtttccacctcggggagagtaactataaatttgtgcatatgaaaatgtccagggggaaaaaaaacaaacccaaaacaaacccaaaacaaaaagaaacacctttttctccacctgcggcatagatagatactgtggcagggttggacctgctgcttttatggaacactgcagagccacatctgataacattcccccaccctcccagcactactgtgaccggcacctgtgtctgctaaggcccacagcacttagtcccttcttcccccgccgaccccatctgaactctgatgctggttcttagtcctactcttaacattccaggtgttctcctaaggtgaatgggtgcacacttaaagacatgaggctcccctcatgaaatttttgtcactgtatttaaaaaagtattagcccttcttcccaaagtatgtgtgagcatccaggttgtgggaaagtatcaacacagcacagggaacatcaaagttgtacagtaaatgatagtctccttgctgccaatggaaaaacttttgatcttggacccagaagaactaggtttgagacaatgtttttagcaaattatttaatctctctaaatctccacatcctcatctattaaatggagatgatagtttctatctctcagggttgtgagaatcaaatgagataacacatgttaagaagaagtgctttctgtaaaggcattattatttgtccttttaggttcagctgaaatcccacctccctgacttttgaaccaagaggctgcctaagattctcaatcttcctttttctggaagctaaggtgttgctgtttctttatttcttgccaaagccactatctcctacagttaagcagtgaaaagagtattcgcctaggaagagcagggttctagccctagctctgccactgattagctgggttgctctaggcaagtaacttacctgctcaagtgtctgtttccagatctgtgaaaggggaacagtgacagtacctgtcttgcctacctcacttggttgcaaggatggaattagatagggatcccctgtgtgtttccggacttctaagtgtctgctcactgactataaacccttaaatggcttatgtaggcattggctttgtgacattgggcaaatgacatattatttctgagcgtcagtttccacatctctaaactgtgtaaacaatacctactttattttgttgttaggaagagtataatgaactaatatatgaaaggtttttgatagagcaccaggcacaaaaagcacagcaagactcatatatcagatgccattgtcagagcattgactccagattgccttttccctacctggcttttcctctctgcctcttcttcgaggaaggggccaatggcagagggaagctttgtgcatgcagatattggcgttaatgccatagcctgtgctgggattgcttttgcttcaggatggcttcccttggcccctgatgacgaggttatgtgttgatgatgcttttgttggagagcacaagggttagtaatgaaatccagcatctttcacctgaccctcctgatccaaaggcatgatgtgtgcggtttcagcatcctgccctcttcccatcttcctttcctgtgccagaatacttgcaattctttaactttttctccacaatcaggtcaggattaaaatgcacgtgggagggactaatataaaaactgccactaaaggtctaatcagggcaagtcctgagaaggtggggaaaggggggtgcaggggtaggtgtcctgaaggttggaagtcagggagagagggaaacagggattagataaaggaagcagagaagggagacatgacgagaaaaatagtttcactcatttcacaatttttctgaaggttcttcttgaccatcaacagctgttggacgattcatcctttaatccgagtatatgatgcttaatccatccacggagctggatagtctgtctttttaaatgaagtatgttgtaaaatcaaaacagtgcttctgccccaaatcttgagggatttgagaggcatgctcacattccatgaatcccaaaatacagattttctgtccaaatagcaggctgcaaagccaaacaaaaggagaagcagcctctgggatctcagatggcaggacagaacgagccagctagagctgattggattgaggccttgaaacctatgaacttcgctggatgcttttttattttatcttatttatatttttatagagacagggtctcactatattgcccgggctggtcttgaactcctgggcccaggtgattctcccatctgggactacaggtccaaatactaccatgcctggcttagatgctttttaaaaaaataaaaaacatacttgtttcttcattaaatacgcaatataggttatttatagaaacacaagaaaatacagataagcattacaaagcaaaacaaaaaccaaaaaaactccctttaacctcactaccatgcaactgctaacatttttgagtagaaggagacaggacagtcattggtggttaagtgccatgattctggggcccaccttcccagtgcaaagcccgacttccccatttacctgctggaggccacaggtaaattacttggcctctatggggcagtttcctcatatgtaaattaggtataataataataataataatgcctacttccaagggcagttgtgtgagtttaaataagccaaggtagtactgcttaaaacagtccttgtaagcactatgtctgtgatacctataataatagttattatgcatctagcctttctcctatataatttataggaagtattatgtataatacatttctgtgaaaatagaattgtcctgtactgttttgtaactttttaactcttatgattgtcttttcatggccatctttttaattagtattagctaacattgattgcttacagttggaacaggcttagtgctaaagattttacataaattatcacatttagtcctcacagttaactctgtagggtaagcactattgttaccattttacagatgaggagactgaggctaagcagtttaaatgatttatttacagagctaacaagcagagaagttagaactccaatctaaacattctggcttttaaatattgcccgtgctagaacttgccatggactttataagaaagtccaggatttctttaggacttctaaaagaggcaggcttcagtgcgtgtcatctttcgttccatcctgcagcaaagaggagaatgaggctgagacagcctggcaacctatgctggcagggcttagagagaaaatgtttgtgcccactcctttttaatccttgacagaacgcacgttggtactctagactgttgggtgtctggctaactgttctggggctgtaatggcattttcagtttttactgtggaaatcactttctggtatgaagcgggatctagggttcagtactactcttaattttttctgattgtgtcttatgcagaaaaagaaccttaaagcagtttttttatcttgttctccagagcccttgacaaagccatctgagccactgatcatagcttccttacccttctctttccatccctggacattcacccctatccccagatattccagggctaggtcccaggcattggtagttaatttaatcagccagtctttgcccagactccacccatgtgaagccctgttctggcctccacagggaatgcaagaggaggactttggttgtgaagacaccaacacacacaaaagcagagctaacaatacaaagcaggttgtgtgtggctcagacaactggtgtgagcccagatcagtctagtaagggagtgtggctgcactgggggttggggccatggggatgtcctggccagaggtatgataggctgacagtaacctttccgggactaaccccttcttctccacttaggagtagctcggagaggaggaaggagaagtcccgggatgctgcgcggtgccggcggagcaaggagacggaggtgttctatgagctggcccatgagctgcctctgccccacagtgtgagctcccatctggacaaggcctccatcatgcgactggcaatcagcttcctgcgaacacacaagctcctctcctcaggtaaggccagcaggctcccctaggctgggcagatgccagccttaccagcatgttcctatatgcaggggacccttctgctgccagagctggaaagtcaccccactacagaactttcacccacagaaacaccatcatgagtgatttattccttcatgttaaacatctctcttccagcagtgacctttaccgtgaatccagctgtgagaggagggcagggacaggaccagggaagaacatgggcacccagaggctgtggagaacacgggctgggagaaccaaggacggcttttgctgacttctcaatttgttgccatctggccataagacccatcctccacactagattgagtccgcaggaagcattctaatccttaacttccagtgccttctccagaacagcaagaaggtgtgcccggatgatcttttccctctgagaagccagttaggccaagtaaatcatttagtctctctgaacattggtttcctcgtgtataaaatggggttaaacatacttcttgcccagggtgtcggtgagaatggactgaaatgatgtccataaagcacctggcctggctgagctcactcacactggggagtccttgacatcacccctccctcggaaaataactggttctcccctccctagcacctctgcaactccaaagttcacaagacatttgctttttctcagttacattcttcaagaaaccatttcctatgcgtcctgaccagaaacaggtgtcttgagtagtcttctggtttcagatcctaggtgacattctcgtcaggggtgtcagttctgtaaggacgctgggcaacgagttgtgctcctccccacctggtctggtgccacaggtggggacagtgtctgacgggtgagcatgagggaggcactcagggagggaaggttcttttgtggttgtttttcagttttccggagtaagcctggtgccttggagacggtggactccgccatcctgttatgaagtggctattctgggaaagagggaatccagtgtgaggctgggaggccagaccagaatgtactattctggtccctgtagtacaggaaggatatgggggacagactttcagaaaataggacgacagctcagtgggcctggggttggagggctaggcctaaagaggcgaaatgtgcagacaagagcaggagagccaagggggaagatatgctccataaatactttcaaagaacaatgcaagacaatggcagatacatgatcctagatgctgcaaagagagaacagtgggctgagccctggcaaggcttggattgctggatataagaaaggctgggagactccatcacagggcatttgtgtacccctccctttaaaaaggcttgtcttactggataactgagggccaagttggctaatgttgcaatcatctttacataaaaagagtagacagtggaggatttaatgactggatggaggccccttccccacagtgagaaccctctcccctgctttcctgctgtggtacttgagattttgctcttagacattaattcctttggattaatcattgcttctttcatcaccactcccaattcctccacccacacaaagccccagaaggggtaatacaggttgagtatcccttatccgaaatgcttgggagcagaagtgcttttgattttttaattttttcagattttggaatgcttgcattgtatttatcagttgagcatccctaacccaaaaatctgaaatttgaaatggtccaatgagcatttcctttgaatgttgtgttggattttggagcatttcagatttcaggttttcagattagggacagtcaacctgtatattaattgtagaatgcctctgactaaatttggactcgttgtgtttctccttatttcacagataagtgaagcacagacaggttaagattgctcaaagtcacacatttagcacatggtgaacctgcacctggaattcaagtccttttgaattttggtccatgggaaaacagacatgggacagcaagagcattttgtaaacctggtcaggcaaagatgctgacaagggctggggtatggggtgtgggggaagggagaaggtaggggaacaaaggtcaacagaagcagctgggggccagcgtgatggggaggaggtcctcacacattcagagagttgtcctgtccttccccctagtgcagggcttcgttttgcatgcttgccctcctgagcctggctgtccatctcagtggttcaaaggttggcctcgaaaaggccacgagttaggctggactccctgagcacatctacctgtgtgtgttctggtgtgagccctcatgtgctgatgggaacccctgtgtgctaaacacacccacagagataggaccagagtggccacagtgggacatcccatatctatcccatctccggagcctgttgaaagttgtggacacaaacttgcctgccctctggctgggctcggccctagaccagctagagcctttagcctgtcagctctggtcctctctgtcccaaggaaagaaatgaaggaaaaggataaaaagtttctacttttggccatgtggtcctgatgtccttgaaggagaaattctcaccaaacgagcacagcccagggaggaggagatggtttctcagcacccgcttttctctgacttctctcccaggctcctgccacacattcgctagactgattgttaagttattttcagaaattgtaagacaagatctttttctttctaaatcgtattttgcttttccaacacatgtagcgttatgaagaggagtacgggatttgtgggcagatagacctgcattggaatcttagtttggctgccttctttctctgcaatgtagtaaaaatttctctttgagctttagtttcctcatctgcacaaagggaataatggtgcttaccctgcaatgttatttggggattgagataacagatataaaaggccttatcctctagcctgccacatattaagctctcaataagttatagcttagaaataaaaattattatgaacaaatatattgatttatattaaatataggcttctggagaaatgatgtaaaagaaaacccagtgtaaattcttactatcctctaacctactttctagcaatttctatcaaaatgcagagtcgtcaaacttttccaaggcaaaacaacccacacattcattatttaagcatttctaacaaaggtgagtaccaattttggctcactttataataggaaatagctggttgcatacctcaaagttcaaaaggctaaaaaataccaggtttttctttagaaaagtttctctttacttagtaacacgtttccctttgattttcacagtaggctgttctgtgtgggaatgttggagaggaaacctcaacgttgagaaattcaggctgtgggtctgggctgccgattgagattcgtatcacaggaagcaaactgaaacaatagctttatgatattagctgccacgctgggctgaggacagaacacactcttacaggaacatcggtggaaatgccacttgattgtcctaaatcctctttcaagatgagccccacaaaccatgagcgaatcagggtcaactctgcattctgagggcattaaaccgcagtgaatatacaaaatttgcttttcattgtaaaactgaattttgggcttgcccaaactcatacatggcgaaatcaaattcattttccatggacctggagatcagcgtgaagcaaggtttctaaagagaagtgtcagttgcattatggattcatcatcatttgcttagcgaagacatcagttataacaagagattatattttcctgatctctagactactaagggaaggatattaaaatgtgagacaagtgattttaaagtttttaaggcttgatatgacctttccatgcaggaaaagtgggacaaagaaagaattgtggaggcagatatatgttctggtaccctctcacaccccactttcagacttcttttcccaggctttcactcctacctccacccctttgtcccacccactccaaatcaaggcctttttctgtcctgtttggaaagaactcaataagctgattcatgtgaggatgttaatgggtgagaacagctaatatacagtctcttctagagatactgactttgttcagatcattcctttaacttaaactaaaaagtctcgtcagtcaacaggtgtttgctgaacccagtcctgtactacatcaagggtaatacagagaggcaagataggatagtaagatacatgcaaagaacaaaggcatgaatctctcctagtggactttcaggactctcagggagcccaggaagatcaggaaggacacagtgccttctgtcaaaggcatcagaggagcccaggcctgctaatggtggcatttaaaggtatggctaaggatccagtaagcgatcccagagtgatttccctgtggcttgactggcactgctcttgcagtctgcacatccgggagggcggggtttgaggggccaggctgtgggtcaggtggaggggaggaatcagtttaggcagagccttagaaggaaggcccctgtggtggtcacaaagtggtaactgccaagcacatctgaaccaggaagaccccatcagaatggctttaagaacagtcagagcagtcctggaacttctcggagtaggaaacaagaggcaaagcgaccttggtggaataaaagtgcagccagcattctgaccagcagcaccgtggggcagcctggtctctgagaccactcaggagcctctgctctgccactctgcctgctctctcccaatgcacagcccctgctgcccaggaagtcccaccccacatgggcggtgctgcctgaaggaaatgagcgttgctccggaaaaagtgctccaaaacctcagcccgcgcatatcctggctgtggggagtcatcaaagcctgtttaccggggctatttttagcattaaagaatcttgttatgctccccaggacgggcatgcactttctcagcagagcacctctggttttaatgagccatctctcgtctttggggtcagaccctgaagggtcctcggaagcaagtaactgagatctggagcccaggatgatttacagacccacttggtggcttattgagcacctactctgggctcctcactttgttctgaccaagagttgatgctggattgtggcatcaccttacagcagtttatctgtcttccccaccagtctgtcgattccgagggaaggaactgcccttacacctttcagtatccctgattctccttaagacaggactgagcacacagtaagtgacacttctggacagattaccttgtgcctagcataaagcagacatgaacacagtagaaacttaataatggtgtagggagcgcgtgcattttcccatgtccgtaacactgagtaggatattaatggtacgtcagggaagacacgatgttcataggggaagaggcagaagggtcttcagcagatttgtgacatgagcctccacggtgaggggctacctcctggctccccagttttcactctcagctccaagctgggagtgacctggccaggttccttcagaagctcccaggagaacaagcaggtgctgtgagggcaactagttccacagagggaagagaccctgtcccggccctgccgtcacagggtccctggggccaacctgctggcttcctggtcctccagccattgtgaccgcagtcccaagacattctgttacccttcgtggccctagattgcccctctccctcccggaggccagctgacccgatgctgctgtagccgatttcgccacctcctggaagcaaatgcactgggcatgggtggaaaccagtttggctgtgttggaactgttaaaaacaggaaattttaagcaggactatttcctctgggactagttaacccaaatagggttgtcttgggattacttcagattttgaagtcagcgttaccactgagatcaaagaaattgaagagaaaatatcttctcggttggctagaaaccacagggttggcctctgtgtatctacagaaggtggtcacctatctggtgtgattgaagtggcgctgaaaacctctcctcactcatctccaaaataagtcaccacctgccagcacagggtaattaaggtcactcgtaggatctttgagttgaggccatagctctcagcatgtggtcctatgagtagcagggtcagcgtcacctgggaactttttagaaaaacagattctcagttctactgaaccaggaacccagcaggggcccgtccagggccagcttcatgggcgtgcagcacaggcagtcttagagggcgccacacttagaaagttctcaggcttggtttaatttttccaatgagaggtctcacatttttattttgcactgggccacgcaaattatgtagcagtgctggtctcagaaatgtttctttcagcctggcctatagatgattctgatgcatactcaaatttgaaagcactgagttaagtcattttctcccctaaagcccctgttcaaatgaagattttagctgggaaagctaacattcacagtggcatcgcccacacctgggacattgcatcatcgcttcagcgggctgatgagctggcagagaacaggtgtatcagcagaaaccccaagcagggatcaggtgtgcgtatgtgtatggtgtaaggtcattcccatgacctgtggttctcccctctccaggctagccgcctgaaccagggtgtgcagaggaaagaatttcccttgtttcaccattttagcagaacagagggaaagccaccggggcattactctgtacaacccaactcttggctctgaagccttgcccatccccggacaggacccactgtgatcctctgcaaaaggcatctgtgactctggcgtgttctctgatcctgtgtcctgaaagatagctggtcccctttgccttcactgaagcctcttggtaggaagatcttgtaatgtggatttgttcttcttgaggaataacagcaggtaacccaaagcttaaatttagaggctccaggaaaaagataaaagagaaacccagttcccttgcagaaaggcccttgaacgacatttcacagcattgatgtgtccctggccaagtggcccataaattgaattgcattctacattccttagaatagtctccatttggaagactccttttagttcagtgaatgttaatgtttgcaactgacatattactctcatccacttgttctgtaaatcaagtgaggcatattttgattgatgtttgcactggataaatacaaattttcataagtaaatgtctttggagttaaataatgaactaggagaagagggctgaaataaagtctgtggtttgtgtataacaaccaaaggcctggggcctaagaggtttcttttggtctgggacaagagccgagtctatatttttcagatagcagaggtatactagatagggcaggatactcaaagtgtgggtggttccgggtggaagttttcctaggctgcacccagcaaccacctgtacggcctgctgagaatgcagttgcctgctcactctgttttgcacctctgggcttcactctctccaaaccattctgtacgccattgccagactaatctccccaaagcagtgctttgagatgcactcctctgatcacatttgcttgacatgtgaggcccctccaggacactgggcctgcctcaccagcccaatctctgagactgggaaatggattctcttcttcagccagatgggcctctcttcagtcctaggactgaagcttgctccaggtgttttccagtgttcacacaatcccgtctggttcagaaggcccttcttgcattccacagagtgaaatctgttttttctaagactcttcaaatcttctttgcaacagttagttgtctgtgatcaccccaaagcgaccccctcgtcctctgaccccttagagctcttcccatctacacttttccttgggagcccagctatgacacccttgaacttttatttagctttgcatctctgagtgctacatattcctcacctgggatctgagcaatttgagggtagtgcatgtcttggagcagaaagaagaaagaatttactgttcttatagttttaggcactttacgtacttatccttacaattcagagatggaaattgttattcccatttagctgatgaggaaagtgatatccaaagaggttgttacttatccagagtcatagcctaataggaggctgatctaggaatagaacctgtgtttaactccaaagcctatgaatggttgagtgtggcttctggattcagctgtcaaagcttgctagctttgcaatctttatacctttggacaaatggcttaacctctctacacttcatctgtaaaatgagattaagaatagtagctacctcgtcggtcactgtgaagattacatagcatgcttagtgcagtacctttcatgtagtaattgcagtatatattagcagctaaaatttgttcctactactacgactaccattatattcaggcatactttgattgatgtttgcactggataaatacagattttcataagtaaatgtctttggagataaataatgaactaggagaagagggctagagggctgaaataaagtctatggtctgtgtataacagccaaaggcctggggcctaaaaggtttttgtggtctgggacaagagctgagtctataggctgtacaggtggttgctgggggcagcttgggaaaacttccaccctgaaccactcacacagcagctcctactgctctcattactagtgccagaagtactgttgtcacaacaagcacactgtcctcacagctcccgtcagggtgtcctctgtgcagtggtgcctgctgccaggcggaggcagacattcagatggttggcagtatgcgtttccagaaaagtccacccaatgcctttgcaccatccctggcaaatgcctatctgtgccagtcccatctgttttcactccacattcatgcaagctgtcccacccccccccctttccagtttgctctgaaaacgagtccgaagccgaagctgaccagcagatggacaacttgtacctgaaagccttggagggtttcattgccgtggtgacccaagatggcgacatgatctttctgtcagaaaacatcagcaagttcatgggacttacacaggtgacaccctcctctatctctttcaaaagaagaaatgtttccatttgggggtagaaatgagtggaaggtgctagccacaatcccacttgacctctccctgcaaatgcccacggtgaccctcgctgacctcaggccacacgcctcaggccacgctcccacccccaagcattgggtttggctttgctcatgtccatcctggtagacagctctctactgactcattaacagaccaagtctctgtcatcatcagtagtccccgattacatctttctgtctgtggacctgacactggactgggattatgagaaaacccaattcagtctcctccctgcctccaaatctggaaggtggctcagcttactcttggagtcttttacttcactgttaggaataatgatgcctaaccttgtttttgaaacaggtggagctaacaggacatagtatctttgacttcactcatccctgcgaccatgaggagattcgtgagaacctgagtctcaaaaatggtatccttaattgtgtttacttccttcttgcccccactgggtgggaatctgcctcccctttgtctacgggtataagggagatagctcatggcccttgtgatgcaggaaaaatggatgtccttaaaaaatttaagtatgtagcctgtgagatgagattggggcattgagaggatccagtactcagaaatatctcctgctggccctgcatggtgcctggtgtcccactactaggggacacctttgggttaggacactgtctctaggaggtttcatcacccaagagtcaagcatctctgccaaatgacaccacccaaaccaatgaggaactagtctgtgccaaagtgctcatagtaactactgtagttatctattgctgtctaacaaaccacctataacatagggctttgatgattatctcccagggttctgtgggttcagtgggtgggtcttgtactccatgtgatgtcagctgggctgcagtcatctgggggccagactaggctggggtgatcaggatagctcacacacgtctgggaccttgtggcaggtggctggaaccctggactcagttggcatgctgggacaacaggactgttctctcactctatggagactcagagactctccctctccatatggtgtctctagggtagccagacatcttacgtggcagtttagggctcccagaagcactaaagtggaagctgccaggccttctgaaggctttgtccccagattggcagagcatcacttctgccccatcttgttggttagagcatgttacaggccagccctggctcattgtgggaggaaactacacgaagccatgagtgtcaaaaggcatggcttgttggagctacttttggagaagagctaccacaggaaatggtaccctgatgagacgcaggtcaagtaggttttgatggagaagaggtttaaaaagatgtagcattcaggaccttacccatggggatacccagcaggtgccagtagatgagaggacccacacaggcagaaagcacgttgcaatggttgcaatggcagtggagcttcctgtcttgtaactgtggccattcaacaaaggcatgaatagggacattgttaagaggactgaagctttggtcagaattggggcttaatgactgtcaaggtcccttccaaacctgagattctgtcactggtctggggagattctgtgcatgtctagatgtcctctttaacaacctcacctgtcactgccatggggcttgtgcttgtccagcctgaataacagaggcagtgaggctaagcctacaaggtttggctcttattaccacacacgctgcaaaaacagacacttcattggctcacctccaccctattacagactgagtctgcagtccacatttgggcctgcaaagtacagaatcacaaccacctcctcttctaccactgccacagctccctcacccagctcctctgctctctcttctgcaggccttagaccacctgggtcctagggtacactggcagagagcaccctgtaggctgctcagtgtcttgtctggttctgtggggaaagggctaccagactttctaaagctctctaaaaagaggattcatgttctgcatgggtaggtgcttgaagcctgagaaagcctgagaaaaccaaagactgatttcttctgtactccagaaaccctttggcctttgggttcttagtgtcagttcagccactgaccatagtctgagtttgagtctgtgaccagaagcaagtaccctacttctctgttcctcagagtctttcttttcaaattgatggtattggactaggcaaaggcgacaacctttcagttctcaagtgccatgattcacagccaagtgacctctaattatctgagtagaactttagatctcttgatctgcatattgaggacttgggatcagtcaaactcaatgcaacagcaaatcttcactgaaggtgccagcctatgggtggactcgtgatctagacctaaagggttagtgtgagttcctagaggaaaagaaagccatgaggcagattgtggaaggctttgaaggccaggtggagggccttgaactttattccatagacaatggggagctattgaaggtttctgtgcaggggtggagtgatctgtgtggagcagtgtttagaaagaatgaacaaggccaggcacggtggctcacgcctgtaatcccaggactttcggaggccaaggtgggtggatcacgagatcaagagatcgagaccatcctggccaacatggtgaaaccccatctctaccaaaaatacaaaaattagctgggcgtggtggcgcgtgcctgtagtcccagctacttgggaggctgaggcaggagaatcacttgaacccaggaggcagaggttgcagtgagccaagatcacgccactgcactccagcctggcgacagagcaagattctgtctcaaaaaaaaaaaaaaaaaaaaaaaagatcaaatgtcagcatggggagaatccagaggttagcaagttaagaggcctcaataataccccagcaacagccacaaatgaatccctccagcccccttatacccaacaactggtctggtcctggtggtggggccagatcccaagatacaggtatatctcattgtatgctaaccccacctctgaaaattaaaatggcaagaatcataatttggtatgggagaaatggttttataatcgtgatgaaggaatgttctctcttttttaaaaaaattcactattcagtctgttactgagtggggtcccctaaggatgttgaagttttgttcaagggtgccacagttcctttgacacataactcttcaggaatatgtcagtcaagatcctctggaagtttaagtgcaggggctggtgactgttcctggaggaaggagtgtgactattcgaaacaaggctctagattgttctatgatgctgggtagggggcaggattatatctttgaaagtaggtaccagagatggtggtgtaggcaggatttagacacagacaagtgggattcagctggcactcttcattactttgttttacaaaaagtggaaaatggttctgaatcgggaggctgtttggcaactataaggaagtaagctatattgctggtcttggtgatttaatttttgctgagagagaggatatgatccaggttgagttaatccataaagtggacttgctcaccaagtccactgtaaggagattcgtaccagagttctctctagagccttgatacatatgtcacttcagggacaaagctaatggcatggtatcctgaacacagctattgcagtttgcaaatggggtacaggaggggttaaattcctcctgagagacaggttataaaggaaagacgggagtgtcggagagacatttctaacctgtgaggaaggcttacacccttggagtaactgtggcctcactcagactgtcccttggaatttctgcgagaagacctgggcctgccccaggaaagggtggctgagttagtggctgataggcagtcgttgtgtcgctgctctgaaggcaccactgaccatgttccagatgcaatgggaaatcaaatgatggagcagctcctcccttgtgggagtttatgctccagttgaggagataagcttgagagtgggaaccattagttcacaggccatgatggagctcagtgttgatggcagaccacaggtgctaagagagcagatatttggaaaatataaacaataggctgccaagaaaaactgcagctgggcccctctcatgaatatccatataaaactgacttcagctggttcttcccatccttccacatccaggctctggttttgggaaaaaaagcaaagacatgtccacagagcgggacttcttcatgaggatgaagtgcacggtcaccaacagaggccgtactgtcaacctcaagtcagccacctggaaggtagggcaacatcaggcctgggttggagtcccaggtgtagggtaacggcggtgcaggggatgcctaaggccctacccccacccccagcactctcggctccatgtctgacccttccacgcctgtctcaggtcttgcactgcacgggccaggtgaaagtctacaacaactgccctcctcacaatagtctgtgtggctacaaggagcccctgctgtcctgcctcatcatcatgtgtgaaccaatccagcacccatcccacatggacatccccctggatagcaagaccttcctgagccgccacagcatggacatgaagttcacctactgtgatgacaggtagggggccatgggtgtgtatgctgtgggcagagatgggtcttacctgtgtgtgtggggagttgtgcctgtattaaaggtgtggaactgaacatagacgtggtattgccgggtgcatgttcgtggacctgtgccactgtttcattgcatcagtgcccctcagaggttcccggtactgtatttggtggtctcccattgacagagcctcagggtccatctgcagagctttcctggtgtgcaactcttctcatcattgtggtgtgaacatatttctccatacgtgtatcaggctcctgaggaaattctcaaggcagtcttctgccccaggagaaagagtctagagacttccatctgtactcctgcttcagaggccagtaaggagcatcagcttctgccctggagactgaccctcttccattactgactgagcctttccctccgccttgttccttcctgcatgcaactccattccggccagtgtccagccattttgaagaagatgaaggtagctgagccagatgctaaccccccagtgccaggcccagtgtctcttaggagacacagtagtgattaagagcatgggcttcaggactagatggcttaggttcaaatttagtaataaatgttcagtgttagctcttattatcacctttattagagttgttgaaagagtgcctaagactgcttaggcatgtcatgccatctcgggttcttagctcatttagaagattgaagcaggtggggaagagactggggttgtcataggagggagtatttagataccctacagctcctaactcccccaccagccctgcctctgggactgtggagcctgatgatgggaggtaggaggaggaagatggggagaacagatgcccggagcaatggccggccccagggagggaaggaaatgcagaagactgggcccagggtaggcctggcttgagtaagcgccactggggcttgctgagcagcaccccccgcatgcgcccttcctggcagagatctccctgcctgacctcagctttctgcagcatctagagccgccatgtgtcccagggtgacagttcctgtggcagctctttgccacccccaactctttgccactcttctctcatcttctagggtttctcctcaggaaaccctcagatctcagtttccccttctccaaaatagagataacactttctaacctgtttcatggggtcactgtaaaatgagataatggctgtgcaagcactttgagaagtccagacaccacaacacatgtgaggcttcttgttattgcttatatcttacttcctgtccttggcctcctccaaagcaaaatcttccactaaactcaaggagctgaaaccacttctgaaggcagttagtggctggggggcaggaagaggaagaatctgacccccagatcagcaagaatctgccttgtcttcctcagctagcaggaaaccatggaaccccaggaaaaaaagctcctgctcagcctcccctaggcctacccacttttctcttatcagctggacatcccaagggcatctggtttcttcatgggagggaccctcctctccaggatggggtttctctcctctgattccagaccggcctggtgttggttggtcgccccttcttagagttggccaccacttgtggcacaatttcagaacttttgtaaaagtatccttgagtcattcctgtccttcagttctgaccacagtagggccaggattcacagcctttggagctagtgggtagttatataagtagaaagaaatgctctaacctcatagggagaaaatgtcatgcatgaagccttccgtcctggaacttcgacacagtcaccatttattgtaattgttagtggtggtggtggtggtggtggtagtggtggtggtggtggtggtggtggtggtggtggtggtggtgataatgatggtggttcaagaagaagattgcacttttagtgacaggcactgcaggaatccatgttataggtaaggttatttatcagatgcagtctttgtattcaggtgaacattctgggcagaagacacagctttgtgtacctcagtagtcttgtgagataacatggacaatcccactgcatagcccctgtgtcactggctttgaggtgaagtggctcaagccgacgtagccatatagcctgggagcatatatagtgctggggatgatgaaagtcagatacgtgcttcaccctggtgaatgaagcacatccgtaacataactccataagcactgggaaaaccctactgtcctagaaaataacttggcatccctacataatagaaaagagattttttttaagcttaagattttgatccttgttacagtgagaagaaatcctctggaaggggtaattcagccttatcctttattcattatcttggtttaaatgagtttcaggtaattttctgaaggtactaacctttggacaaaagaagagggggagaaacacaaggaattggatgtctaaatgtggctggagaggaaatgtacatagaaaggggaaagatgctgtgctgacttcttagtttggctcagggctggtagccagagtagcttctggcttaaaggaagtatcaagcctcgtgatttagggctttgtgactcataatgtagagggtgatattgcttataagttctgcgagacacactgcattttcagcaaaatcttgcctttcaagaaacctaattacatggccccaagtctgaattcagtggtgctggagagctgcatgtagaagcatttaaagacatagaatgctgtgtcacacagaagttgtgtttaaccgattagcagattagttaacaagggcacagacatggcttagacagttgatgaagtgactattttaagtccttaatccctaagtgttatatcttaattgctttgatgaggcctgagatatttttggttttggtagcttgttttgttttcactctttgtggtgggatggggagaagcatatgcacatgcacacatatatacactctccgcctcaattcccctttagagacaaatcctgcaaaaaccaatgcctgtccaagatacctaatggggtgaggggttctccattttaatcaggaaattcactaggtttaatgacatctgagacacacaaggtgctgtgattcccacaaaggggattgttttcctacaagaaaagttagaatctgaagaaaatgtatggcagttagaatccacaaaatcaattttgaagcagtttggtacttgtcttatatatactgagaccacagacacaatcaagcaaaaaaagaaaaagggtcatggagaaaaagatgaaaaccgacaggaaagaagggagagaaaagacaactctaattttacattgaactctcaggtcaaatcagttgaatctgaaacaacctattctgaaacatctgaaatagaataaaggaatacagatggttcaaaatgcatttgtcctcctgttaatgagggatcagagtaccatattaagtcctgcattaattgtttttaaaatagtaaatacttttaaaagtaaatttcataacaattcatgtcggtcacatttatgtacctatggtcaactgctctagacaaggggagcaagttgagtagcagggtaaaagaaaaatatcctgattattaatggaattaatgatctcttcttcatttacgactcaaacataggcaatatactctgtttcccgaaatactgagcaaccagttacgaactgtcatttactgtgcatctgctatgtaactgtgtgccagagaccattacatcaaagtaaaagagatgattcctgatcttcaggagttgagagtttgagacataagccatttaatgaaaccacagtgaatggtacaaaatacaacattccatttacccaaaaggaagacaaaagttgttcccaagtagtttaactttaaaatagggtggttcttaaattcatgtggaggtgccatctagtggtgaaagaggtaactgtgaaggaagccaagccgtcagggagatagaggccaggcctttctaattatcatataatcccactgcgattttgtcagttgtaggagtcttcctgtatcttagaaataaattataaaaccaaattatgtggataggagcagtatcaccaggggaagaggtttcaaaattacagtaaaaatttcaaatcaacaaagagggtcatacaatttttacaggtaaagaactttagggcaaccctgttttgtcattgcatttagggaacataggacatattaatatcaggagttacagttgaataaagatgcctacattccaagttctgtggataaatttatggtgaattgtttttctacaaagaagttgagaataagtaaaaatggtgaaagtgagggaaacgttgaggatcctaaagataatgtcagtaaggagaactataaagagccataagtggtaaaacacacacacaaccttcctatgtatactcttacccctacaggtaccctgtaacactccacagacaggatagaaatggatttcccgttaattacagagctggttgtatagatttcatataaccatgtagtatttgaggaaaacacaaggcttaagtactgtttaaagcaaacaaaatctagatgaaaatatattaaaaccaaccgaaggcactgaaatctgagttagtgaacagcgtacatattagtaaggaaacgcagtgtcaaagcttataagcacatatagaaaccaaaatgagataaatcacggggtgctgaggagaggcgatgggcagagtgtggaaggaaagcaagccgacttgaagtatttattagcagatacattctttggaaaacaaataggtggttacaaagtacttaaaactttcatcctcttaaacagtttaaatactctctcaccatcttgcttacatgattaatttacctagcaaatcctttactcgtgtagggaacaggggtaaaaactgcagccagatcttgcgtgactccaggcggtggcatctgaagtcaggcaccgtggcgctgcaccgcacgtggacgggtgctggcgattacatgcggggaagaagagcgagccttctcaggcctgtgggtggatttctttctgccacttgaggtggcagcactcacgctgtagccaagagaataatttttttgcgagcactctgctgtaggtggtgtattttgaatagagcttctaaacagttttgagagtaaagagcaatgaatcattcattttacattttgaaggcacatctcactctgaagtccagtgctcagagagctgacccacgtatttacttggggtaacaccaacttcagaatttaacaaccccctttaaagctgtattttctatttcctttcatccttcctctgcctccttgtggctgactatctatctgcatctctctcctcactgcatccttggtctgctgttttttgactttattattaaaaagtatcctctgttcttatgtttgaaatctggtgaattaagtccttgtacatttctctcttctcttagaacagccctactgagttgactttgaaatttacgggtgacctcaaactgattttctttttcccagtgagtcaggggtccttaattagaaagaaagaaaaaaaaatagttccctggcccctgatggagagagcagatgaacttgtgttatcacagcccagctcggaaggcttgtctggagcctgggggaaatgagcggggaaggcccttgtgtgccgtaggagcgaccttataaacaagctcggttcattaacctccccactggcgtctacgtgcctgcacgtgggggcgaatgaccatgagctttaagttggggtttcctggctttgtgaagtttgacaactcaaatgttcttcaattgtgtttgggatgtggtgtatttcccagtttttatagtagtctgtttaaaggaatgaagaaagacattaaatatttattttagttgacaagataaatgaaagctgctactgggaagatatctggcagttctgaaatctaggtttgtttttccacttccaaaacatgcccattgtatgcctttgaatggatgatacattaattagataaacattttattatgaggcagattataataaacatctactttgaacattttaatttaaagattctaatctcgaaaggaaatttaattccttcagagagtagaaagacatctttcctagaatgccagtaggctcattttggagggtctctagaaaattctagacctgcccaggaacagaagcagtttatctggcaagtcagtgagcctgcagatggccagaccattgttagcagggcttactcatgcagttctagttcccaggctaagcttgaaagtcatccgacccagcagcgaagccatttgatcgtaggaccagcactgttctgtctccttgttccccccagtctccacctttgccaaggtgtacttgggcgccagccccagggtcaggttgccagataatgtatccattgctaatgagttcagagacctctctgctcagggccaagcgacgggacagatccttctgctctgagactggctggctggcacaaatgagctgctaggatctcactggagaaatctccactgggctgaatcagctgagacctaagcctctcagccctgttgagctgctccttgtttgacaaaggctttaacccccaaattctcacccaagcagagaacttgcctcttctctgcccacttcaaaaccagatgacttacagaatgaagaaaggatggatagactatcatgacaggttctgtgtgtgtgtgtgtgcgcgtgcatgtgtgcgcacacacattgagacagttaatcatattattctagaaaaaaaaagtagatccttagtgcccaggttccttagcagtgctgggataaacaggtgtctgtttgtaccgtaggttcaaagagaaaatcaatctactggtcagctgttgaggtttttactaagcacccgttatagaggaagcaaaaggagaaagtggtccctgagttcaggggttgacagcctaggatgtgaggagacaaatgcataattttctgtaatattgtgcatactccttaggacttcacgagagacgttgtgctggaggaactggagagggctctgtggagaagatgaggctttagctggtcctggaggtgtcagggcttggagaagaggggagaagagaaggcataaagcttctgcagcaagaatgagttttccaggcatagggaactgaggggagaggggtcttccatgacagagggtacataacattttacagatgagttgaaaatcaaattgctcaaaagatggagagtaggttctggggggacttggaagttacgcagcatttactgttggtgtggttggcaaaagtgaaagctgtagatacttaaataagagtatggcaggttgcaagtagtattttagggcaatttggtctgacagatgtatgcaagttgacctgtttggggggtgggtttagagcagagacaggaaatgaggagccactgcttctgctttctgcttctgctttcctctccgtgttattgatcccctacaaggataaattataggactgtatccaggagtcatgccttctgaagtagagttgtaataatgagactgtggcatcacttctaacttgtgataggccaagtaaacaagacagtgaagccattatttaaagtctgtgagagaaccaagattttgagagataatatggaggtattatatagcctaggataggacatgatattgggtaaagcggccaacctggtggttcttaggcagggctttgtttattttagtgattacagcacaaaacaaagggtcctaagaatgttaagtgattcttcatggttctccacatttgccctttcctctgcccacttcccatcaaaaccagataccttacagaatgaagaaagggacactgaaatgacagccagtggtgtcatctgagctgcctattagagtataataaggcacatttctatgactatgatttaatatttcttcctctcagcacctccttgcctccctcgtttccttgaaatgtgaggcacaagtagaaagtgtccgagggcacctgaggtcacaggcaggacctgcagaaaagtgaaggtttaagcacagacgggttctgcctgcctggactccctctcacgtgctggttgacacagagacaaaggtggctctacctggggccacataattttcatgtttcatttatactgccttctactagaatgagcttgatgtagcaactggaggccccagttttcattcttgctctgtccctggacacctgtgtaggcatcgagcaaattgtctgcccgtcctggatgtctactccctcatctgcaaaaacttggggtgagccccttccagtggttcttggagaacagacatatgtgtgtaccggggtggtggggagagggagtcctcagaactggtgcttttctctcctcccaaacatggcttcaggaagggcaggaacaacaggggtttggttaaacctgcaactgtagattgagcacagtgttcttttgcttggatacatggtacaacaagaaagtctggattgtgttcatctgcatgtgtgtgtttgatttgccttctggggttagctcctgcccacatgctgtgctaagttaatatggtctttcttccttacatgctgcctttttaaaaactcagaatcacagaactgattggttaccaccctgaggagctgcttggccgctcagcctatgaattctaccatgcgctagactccgagaacatgaccaagagtcaccagaactgtgagttccaggagtgccccttgtggcttccttgtgtctgtggtatgtggccttgagtggggtgtgactggtgagacagaagaccaggtcacttcctccacagagctgctgtcttgtgtggcagacaagacttatgccctcaagatggttagaaaaccaaggctgccaccagcctatagactccttcgtgcaaattagaaaaaggacacttcctccagggagatgcacccgtgccaaggtgcacagctgaggcagtggagggtgggttgagtctcagtcccccataccacctccacggagtgcctgtgtgcagtcagtggtttgcacaccttgtggaacagcactgtagagagtaaaataattcaacatatcatcaacttgggtgcatgctatagattcaagtacatacattcacagaagaggagggcagggggagttgaggaaaggacacttgagttggaccttgaaggatcggggaggcttaggctgaacagaggggaaagtattacgggtccaacttaacacatatgttgaggtaggccacagttctcagagagcttgcttgctggatcaagggagctttagaaaaggctgtccaggcaacccagggatggcgtatggaaactctgctttgcagtttgaaagaagcctgagttatgtaaggactctggaagagggctgccacatagaactttctgcagtggaaatgttcttgaaatgtggctagagaaaccgaggaactgaactttatacaatgtagttttaattaatttaaatgtaaatatccacacttggcttgtagctaccatattggacagagaagttctagagtgtatccttggccatgttcccaattcaggcttcctataggcaggtgatccaggaccgttcccttgaatccatgcgactcatcactgtgcaagggctctgggcctataaccctgtacttggcccactgggggtgatataaattggtagaattgattcctgccctaagtgaccttatttctgaggaaaaaagaggaccgtgggctccttgggaacaaggggctcatatctttaacctcagtatctagcatagcgtctggtacagaacaggcactaaatgcactatataaaccgatgggcaagactgtatttggaaaagaatgcttcaaaacgagtgcccacagtggtgcagacagtggtgctgagaggattatgggaggattaaaaacgggtaaagtaagtctgagaagattcccagtggccctgctggcaatggagaaaacggaagggcagccatttgtccatggctcctaaatccacccatctaccccaaggctaagacagccaagttcagtgcagccagcagagtcacaaccccgcaagctgtatgtgaacatggttaacccactcttaaggagtgagatctttcttttcttttattggttcctctgcctcttcctcatggcttttgggtttgatttgacagtacaacagggcccattatgatatctcagagaagtttctcactgtgctctctggcaaaacacacacgcgcacacacagacacacacacacaaacaacctagattcagccccactcaggaacccagagatggggtaggagtggaggtactcttttatgcctgtgaatgtgaccccaccttagcctgcccaagctttgaaattgtaacatctggttccagccttccctttgggattccttcatgcttcctggtccctgaggggttcctgttttcaaaggcaggtgacagaatcatccaggcactgggacttagcggcccaggctctggcccagccgacccactgattccctagggcctggatttctggaccttcctgactttagatgtaaaactggggaaaagtctagccttccttccaagctaagggtgaagccaaggcaagagacaaatgtaaaaatttctgggaattcttggaggacagtattaccttttatcttgtaggatgggaaagcagaagaagctactgtcaaaggaaaaaaaaattgtgacttctgactaggcatatagaaaggattttccctcttgttcttcttagaacatcttcaatccataaaaagggctaggataaaaatggtttatgttttctgctgactctagggaaaataaggtgctttttactgaatccgtgtatttacttattaggcacactgaaaggtaactcacagcccaaatagaaatcacaggctctctctccccttgatggagccaagtaaagctgccctgagctcagaaacccatagctagcaaagggacaaacccatagctagccaagggaaatctgcttgggttggaaattggattaatgacagttatgacacgagcttgccccttgcccccgacccctgtctctcattcgtccttgaggttttgcaagtcaagtttcactacagactgacacacatgctctagactaactggaggctcaggtttgagacaggtccagattcacacactgggatcccccatttacacacatgtatgtcttagcctgtaaaggtttaccgttgaaatgcctggagaagctcaactagatttagatcattgaaagctgtaatttccaaatggattaataatttatacactgttactctgggcgtgaggttaggggtcagtctccctttgttatatgaggatattatgtgcttttaggctttttatggcctttaatcttattttcctatctattaagtagcaggcccttcaccaaggctggcattaatgaccagatgattagaaagctggcgttaattatattctactgacagagcaggcccttgcctgcaattgttagaaatgcacttaaaacctttgcttgctgcactgtttgatcaaaaagagtaagagccctgaatttggtttgcattaaggaccatctaaataagttaaatacaggcacttgaaattgtgcaagaatcattttactgcagcagaggagcctcagtggcacagataaagggagagcagagaggacaaaagttatttccttggttgagtccatgatggtttaggacagcggcaacagcaagtttggtcttcccagtgatttgtggacccaggtaataaagagaccattgtattaggagccaccagacatgttgtgtagctcagactctgtcactattgtcttgtaagctgtgaagcaaatcataaccctctggccttagtttcctcatgttaaaagaaaatacttatcctccctgtggcacagggttttgtttaaaagattagacaagatgatacaaccattttggaaataatttggcagcttcttataaacatatactttacaggtaagccagcaattgcactcctagctgcacccacgagaaatgaaaatatgtccatacaaagatttatacacaaatgtttatagcagctttattcataataatcaaaaactgaaaacaactcaaacatccatcaacaggcagatggataaacaaattatggtatgtccatgcaacggaatacaactcactgatgaaaaggaataaaccacaaatgcctgcaacgccatgatgaatctcaaaacatgctgagtgtagagaagccagacacaagagtagatactcctatacaattccacttacatggaaatctagaaaagacaattcgaatatatagtggcaaaaagcagaagagtggttgcctggaaccagggtgggaatgaagattaactgcccagaggcataaaaaatggggtggtgggggcggtgatggaaaagtgctatgccttcactgtacctttgtcaaaacttgttgaactgtatacttcaaatgggtgtgtgttttattgaaggtaaatttgaccccaataacatttatttttaaaaattaagagcaaacagaaaaagcttagactaggaatctttaatttgaactataattctgtctactgtttccactgaggtggtctttcagcaaatgactcagtagttttaagcctcagtttcttcagctgtaaagtgggaataacaacaggcaccccatggtgttgcctatgaaatgcagtgatgatgacctaatccttagtgagcgccctatgtgccaggcactgtgctgaatgctttgcagaaacgaattcatcttatcagatagttctgaacactgcaaagcactatacaaatgtaagttacaggaattcttgcactttgcaggtgcttgttaaattgtgaagaagaaagcaaaacataagtgtaaaggattaccaaactgcactagtatgaagagagccatgttcctcagctgtacagggctgatgaatggggaggaggcctgcgagcctaccaggagaaccggggagactctctgtctaccgagagcctggatatcctcccgagtggcccctcatgagactatctaccaacgtgtaacagactgtctgtgacaggccatgggcataatatgtattagtatctctaagaaagaggtggcttttcctatacaaaatttgttggtgacagttggtcaacacttatgtacctgataagccatgtgggtacagtcgatcctcagtacaaatggcagtggtatgctgggtagctaatgatgacagttattaccgttactactattattatcaatatcctgttttgcagaggaggaaaccaaaaccaagaaggattgttcctttccccaaatcccaagctagcaagatttcccgatcctccctccatgccctttcctaacgtctctgtgatttgggagcttctgagctggagttctgtaaattcccaaggaatgggcagttcagaaaaataccaaaaattctaacattattagactttaaagagatttattgattccttttgaatggcagcagatggaacattctggactggggaaggacagtctgtgatgtgaaacccttccccaaggtagacaacaaaagcgttttttaaatgaacacttagtagaacaatctagaagaggaaaaacctcataagtaggaagcctagctgggcggttgggagaaggagtataagtgatttattacagcttatgaagagactgtgtgtgggctgccagggtcccagctctttctcagccccaactgagaaagggtggggtggtttgcctctgcctttgctgtgggtcacaaaccttcagtggcccaaaaggtggcaagcctgacagatgacctggagaaatcaaggatatcaatgttttaaatgcttttattcataagcagggtattggtggtgggtctgctgaaaaaaaaaaacaaaaaaaaacaaaaaaaactgccctgaggtcaggctttctccaggctgcttagaagtccccccacctggagtgcttgacgggatggcgctccttacccagtgtgaaggggcttcttctcattgaaccccatgaagaaagtaaggcaggttctggacttggttctgcttatagctgagctggtctgtgagcctgacttgtccagggattggtgatgggccactgcaaagctgcatagtgagcgggtccctccctcagtagacagccttgggcaagtcatttcacctcttctcacctctttttcctatatttaaaatgaagagttggctgaggtgatccctaagctccctcccaggtcactctccctggtcctcactgtcgtggcgccctgttctgtctgttcccctgcagattagactgccctcccatgcgatctgctgagcctgtggtgcacacccctgccccacctccctaagctcagctctgtttctcctcccctagtgtgcaccaagggtcaggtagtaagtggccagtaccggatgctcgcaaagcatgggggctacgtgtggctggagacccaggggacggtcatctacaaccctcgcaacctgcagccccagtgcatcatgtgtgtcaactacgtcctgaggtaagcatgtgagggctggcgggccttggtgcagggtatgtgggggtgcccaagcttcccagactcaggatgacaggcctaggagatgccaggcctctcagcgccctgggcaccacctcagggaggtcttgcagggctaaccctagtgactgagaggacttcctgtggatgtcttggaacagtgggatactgggttgggatttttttttctgcgctttccctggcatctgtcatttatgccatgcatctgacccaggtggggaggcagatagcacacaatagtcaatattttctgaatggggaaaaaggaaagagaatcgcttatgcttttgggaaaaaaaaaagatgtcatgccttcactctatagtacctggaaagaaagctagaggaagtcatttctagttgtttctacagacagagaaaaacaaaagcatcaggcctcatatataccaccccactcaagtgcaataatatttaataaaacaggatccgaaacagacatacattcagaggatacctctgttgtcactacctccatggctcacacacttctattgtatggttctttataagacgccaatgcctggagtcctacccattttttgtcggagagcttagctatgagggtttccatgcatctaggggagcagaatttttctagaaaatgtggaaagtctgaatggctctttcccccccattagtgagattgagaagaatgacgtggtgttctccatggaccagactgaatccctgttcaagccccacctgatggccatgaacagcatctttgatagcagtggcaagggggctgtgtctgagaagagtaacttcctattcaccaagctaaaggaggagcccgaggagctggcccagctggctcccaccccaggagacgccatcatctctctggatttcggtgggtgcttcttagctaagccaggcccctggaaccccgttggggctgggaagagttcttactataacaggcctccctggctgcagctttttcttaaccagagctaccccagccccccaagtcttgttaatcacctgttagaggccaggccctgctgagcacaaaagaacaccacacgctcctgccctgataagaccatcccatatccgacctcaccaagtgctgtacgaggaggggttaagagaggacacccccctgagggtcgattctccaccatgggtggtgagagtctgagatgagagggaggggagaggtgagggatctgctccgaggccacttggacactgtcaaagagaaggggcagattcctaccagggtctggaaggacagatggcttgttcaggcagagggccaagttggagtaatgttgggaaggatcattccaaaaacacagagaacatattgaggcctgggattaagccctcaaacccacgacttcattaaagtgtctgcctgtccctggggatgtaagtcactggggaccccggcagggttttcagccctcggctgctccaatcctggaaacacccttgaagccccatgctccccagttcgcaacccgctgccaccctctcctggccttgctgtggctgccggaagagtggtgctcaccctggactgtgtcagccccttttagatgggttctacagcggccacgtgaggattgcagctaaagagaatctgaaacgcagcgggcccttggccagtaggtctcgcggcttgttttgtggcagtactgaggcaaatagctcaatagcccaattctcctctccctctcataccttccttgtctacccttccggatctgttcctcagggaagagtggctcctaatatatttagtctctgaaaattaaatgtcccaggagactgttccgtttaaagggagtctctacgttgactcatagccagagtcaaagacccatgtgttccagctgagccccagggtgttgggggggcctagccccaggcatgccttccagaccctcttagggccttctctgcggtttttgggcctcctctgccttggggtgagcccgatggttgtgggtgttcacctcccaggcccttgtctccacagggaatcagaacttcgaggagtcctcagcctatggcaaggccatcctgcccccgagccagccatgggccacggagttgaggagccacagcacccagagcgaggctgggagcctgcctgccttcaccgtgccccaggcagctgccccgggcagcaccacccccagtgccaccagcagcagcagcagctgctccacggtgagcagccctcttatggcgaggacacagagagggctccgtatgtatgactgctgccagatggctgaagggacatttgggacaggtactgtccttctcaggttatcacagagccccctagagtggccgtgacacttacctaccaggtatcagagctgttttcttccttttagtgttcatcccccaactccattgaaataagctccttgaagggctttgagcccccagctcagtccccatacagggcagtaacatcccgtatgtggcacagagctgcacagtttgcacagccctgctggccacagcctgtatcctgtttggtcctcaagacaggacaacctgtgaagcgacagtagcctcattttatgatgaggagactggaatttagagaggttgatgaattgacctaattcatacagcttgttaattagcagcccctctacaaatagttgtgtggtggaatggaattgaacctttgggtccaggaaggtatttcttcttccatgctggacttctggggagaccagtgccatatctttgactctgtccccctccttcctggcccctagcccaatagccctgaagactattacacatctttggataacgacctgaagattgaagtgattgagaagctcttcgccatggacacagaggccaaggaccaatgcagtacccaggtagatggctgtggagatcaggctagggtgtgtgcctgctgtctggtggacagcaaaggctcacatccattcttgtagcctcatccctttgttgtaaagagcagtggagacgtttggccaaggcccaggtcccctaaagaggtaggggtacagggtaatggagcctgtggtcaccccctcctcccactgtcaaatccagctcttccagcatatgtgtctcctacttagatagctttcttagcacacatgaaaaccgaaatgataccactgcacctttctttaaacaggccctacatttaacaagcatagccagatgtataaaacatgtataaacataggggacaattaatccctttataaacacattcatcttgtgattttaaaaaaataatcatttttatatgaaatgcactttaaaataaataacatctgtttgacaatttttcatttacataaaacttttcaggaacacatttattacataaggccaatgttcttgcaaaaactatgtaaacaaggataaggtagagggaggggtacgtgttttacaaaaccccagggaaaaccattaatcccccatttgtcttagtcttgagttcaaccagatttctgccttgccacttagtttgtttcttgatcctacttggcacaaatcccagctactctgcaaaacatgcccaattttagcttttctatcaccctccctcctcagcactcctgtagtatatatcatgtggcacttaatcacagctatctgcttctgctccttaaagattgcttagtattgcagtcattagtcagctgacacccactgagggtgtcagtctctgaagttagaaactgttttccgcatctgcttgtattcccctgcttgtatcatgcgtccgtcatgatactgccaccctaagggatgatctgagtatctgctgattggaaccaaagtctctgtccctggggtctggctgttaggctgttactctgcgagagtccacagatggacctgggcacttactgcttgcttaggcccgtgccagcttacaggagggagaagaggacaaaaaaaagccacagtgtgcaccacaggcctaagcattgtaggacaaggataaccaccacaggctggagtaggcagggctgactctgtggaagaggggctgcctcggcttcaagagagaaggcgggctccggacaggtgggatggggagaggagaacatttctcaatgtgcagggtgaagaggggataaacatgggggaaggctggtacatgatacaaggtcgtgtacatgacacagccaagtctgaggttttcctgataggccctcgggagccagtggaggcgtttgagcagcactgtgaaacagtgcttgagatgaatggctctgcaggagctgagttggaatagtgtttgtgaggtcgtaccaacccccttgcctctttgccggtgctgtctcccctcagacggatttcaatgagctggacttggagacactggcaccctatatccccatggacggggaagacttccagctaagccccatctgccccgaggagcggctcttggcggagaacccacagtccaccccccagcactgcttcagtgccatgacaaacatcttccagccactggcccctgtagccccgcacagtcccttcctcctggacaagtttcagcagcagctggagagcaagaagacagagcccgagcaccggcccatgtcctccatcttctttgatgccggaagcaaagcatccctgccaccgtgctgtggccaggccagcacccctctctcttccatggggggcagatccaatacccagtggcccccagatccaccattacattttgggcccacaaagtgggccgtcggggatcagcgcacagagttcttgggagcagcgccgttggggccccctgtctctccaccccatgtctccaccttcaagacaaggtaagtggcagatactcagctgtaccagcagggccgaaccgagaggcacccactagtaagatagctggacccccagggaggcccctgcccctctccccagccatctgataccccatttagcccttctctgagctcagactttggggaatcacctcaagccatgtgaggcctagtgtaggatgggtttttatctgggctgccactgagggcaggcaaagaagtggcttgttgagagccctgtacctcagtgtctcccttcggaccaccaccagagtgcctttcgtatctcggttcatcatctgagccacacagaaaattgagtgatgattttccctggttgaaaacagcaaaaagatacccctgcctccccttgccttttggctgcccccgggtcctcgccactgcagcctctcccagctgtgcctaggctccagaaatgccttcccatctccccagcatgctcatttcaccagctgcgagctcactgggctaaggcacaggggttggtacatgacctgccactcccaggggccgctggtacttgccctttatagagcagccaaactagttttcagtgggagcaaaaggcagaggagagacatgggcagaagaaaccctcctaaggactaacattgcccagccaggcagccatcccccagaccaggaggcttgagcccttcagcatcttatagctgaggaaggagacagagctcgagctcggcctgcaggtgcacagcctgcctctgagactctgccttttgggtctttgagtcatcacaggcatcagcattgggactggaagggcccctaagatgagaaggcactgagtggcatgtggctccagactccctcatagcctgctctctcgggcttggcaggtctgcaaagggttttggggctcgaggcccagacgtgctgagtccggccatggtagccctctccaacaagctgaagctgaagcgacagctggagtatgaagagcaagccttccaggacctgagcggggtgagtcatccccactggccacaggggcctctccatagcccttagggaacccagggctgctgagaggggtggggatgtggcccttccaagccagcatagcccttagggaacccagggctgctgagaggggtggggatgtggcccttccaagccagcaagtgccagccctgttccaggcccacccaacccacccagtctggggacctggttctctggccatttcccctttccatctgcccttcttactcccagggggacccacctggtggcagcacctcacatttgatgtggaaacggatgaagaacctcaggggtgggagctgccctttgatgccggacaagccactgagcgcaaatgtacccaatggtgagcagcggccacaggcctgggcctcctgggggttctggtggaaggactggggctcgggagcccatcctggttcttccattcaccacaggccgtacctgcctctctgagccttgttagaatggggcgatgtcctctgtctctcccgcagtcccacacacccaacttttccatctccactctgacttagatgatgccatcagagggtcctgaaggttggctgtagttctggtgactctgagcaccttttataaaggaaagggatgctagggcttcctggcctctcccctccctcaggccaatgctaccgtcactctctgactttggtctttcagataagttcacccaaaaccccatgaggggcctgggccatcccctgagacatctgccgctgccacagcctccatctgccatcagtcccggggagaacagcaagagcaggttccccccacagtgctacgccacccagtaccaggactacagcctgtcgtcagcccacaaggtgtcaggtgggtgtgcccaggatctgtcacccccatcccaggattcgatgccaggggaagcccacgtctactttttttccagcgtctgcacagtgccaggcacagggaggtgcttgacttgaagtcacctatacagggctcaggtctccttggatttagggaacctcctcacaagttccttgtgacatcagtgatcaggccccccagtgggtgggtctgagacacagctaaaaaactcaaactcaggctagaatactgaaggaaagaatgcagaccactaccgactgcccaaagaggactgaacactgaacactgggttggcgacccccagaacactgtaccactgttgacaggagcactttcagaagaaagagcaggcggccacagtggtgagggcctgttgaagaagagaagagaaagttcagagagagagagttgggaagcggtctgggcagaggcaggggatctcccgtctatgcaaggatgagcttgctgcgtggagaagggagtgctccttccctggggctttagggagaaccctcccatgatcaggtgccatccagggctctttccaccctgagaatcccggagccttgccccttcctcagttcttcatgtggatgtgttttggggtgtcactctgagttcaggcaggtgctgagaacatgccaaaacttccttcaggtagaacagcctggaaagctctggtaggcccaccccactggacttggttcaactgcaggcaccaatgcctgccttcaaccctgggccaccttcatcttgacagtatcttgtgaaacatatatgtcttcatgaggtttgtttggcctgaaaataattcgtggtttatggaaaaacataccaggcccctgttctaaaaggcaatttcctcagcaatagagtttggggaaggttatagttctgtgcttcagagtccaggctgtagaaacaccagacagccctggcttaaattctggctctgctgttgagttcaggggctggtatatatttatgtgcagtaagaggtagccagcactattcttcctgttatgtgaagcccacgaattaccttgaatattgaaatcaagggaaaatcatattcttttcaaaagagttgaatcatatcaaactcttttctgaccatgaataagagaagttagcaagggatggtgagcaggtatccattgatactgtccacaggagcagtcaagctggggaggcaggcatggaccccagcaaggatctgagctaggaggtgcaggaggcaatggccactggaacgaggctctgcagataagggaaggtgggtgggcatctcccatcggaggggcagaatgcagggcttccaggctctctgctgccacctaagcctttcctccttgggatgggggcctgtgtgtgtgctgcgagtgtcccccctgccactccctggtctgcctcctcggcaagagaatagcacagaggcaagaagaaaggactgctgagggtggtgaccagaaactggattttcagactgttgaatcttgaggcagtctgtgtttgcatctgtatgtatgtgtgtgttctgcatgttctgtgtatgtgagcataggtgccaggtggttcagcctttcctccctgctgccaggaggcatgggggtcagcaaccccaggctcttcctgaagcttccacatacctgtgctgcagcccgcacctcacgctttcctctttcttgggtctcagcaccccacctgaggcagtggttctggaggcagacacgttccccgggcatgcagcaggccgtgggacagacaccactgaaggagcagagtgaaattagggctgctctattggtatcccccagtcacaaagaagtagacacttttccaaatgttcgatttaggcctttaagttatggtaccaacccttctttcaggcatggcaagccggctgctcgggccctcatttgagtcctacctgctgcccgaactgaccagatatgactgtgaggtgaacgtgcccgtgctgggaagctccacgctcctgcaaggaggggacctcctcagagccctggaccaggccacctgagccaggccttctacctgggcagcacctctgccgacgccgtcccaccagcttcactctctccgtctgtttttgcaactaggtatttctaacgccagcacactatttacaagatggacttacctggcagacttgcccaggtcaccaagcagtggcctttttctgagatgctcactttattatccctatttttaaagtacacaattgttttacctgttctgaaatgttcttaaattttgtaggatttttttcctccccaccttcaatgacttctaatttatattatccataggtttctctccctccttctccttctcacacacaactgtccatactaacaagtttggtgcatgtctgttcttctgtagggagaagctttagcttcattttactaaaaagattcctcgttattgttgttgccaaagagaaacaaaaatgattttgctttccaagcttggtttgtggcgtctccctcgcagagcccttctcgtttcttttttaaactaatcaccatattgtaaatttcagggtttttttttttttgtttaagctgactctttgctctaattttggaaaaaaagaaatgtgaagggtcaactccaacgtatgtggttatctgtgaaagttgcacagcgtggcttttcctaaactggtgtttttcccccgcatttggtggattttttattattattcaaaaacataactgagttttttaaaagaggagaaaatttatatctgggttaagtgtttatcatatatatgggtactttgtaatatctaaaaacttagaaacggaaatggaatcctgctcacaaaatcactttaagatcttttcgaagctgttaatttttcttagtgttgtggacactgcagacttgtccagtgctcccacggcctgtacggacactgtggaaggcctccctctgtcggctttttgccatctgtgatatgccataggtgtgacaatccgagcagtggagtcattcagcgggagcactgcgcgctatcccctcacattctctatgtactatgtatgtatgtattattattattgctgccaagagggtctgatggcacgttgtggggtcggggggtggggcggggaagtgctctaacttttcttaaggttttgttgctagcccttcaagtgcactgagctatgtgactcggatggtctttcacacggcacatttggacatttccagaactaccatgagatggtttagacgggaattcatgcaaatgaggggtcaaaaatggtatagtgaccccgtccacgtcctccaagctcacgaccttggagccccgtggagctggactgaggaggaggctgcacagcgggagagcagctggtccagaccagccctgcagcccccactcagccggcagccagatggccccgcaaggcctccagggatggcccctagccacaggccctggctgaggtctctgggtcggtcagtgacatgtaggtaggaagcactgaaaatagtgttcccagagcactttgcaactccctgggtaagagggacgacacctctggtttttcaataccaattacatggaacttttctgtaatgggtacaatgaagaagtttctaaaaacacacacaaagcacattgggccaactatttagtaagcccggatagacttattgccaaaaacaaaaaatagctttcaaaagaaatttaagttctatgagaaattccttagtcatggtgttgcgtaaatcatattttagctgcacggcattaccccacacagggtggcagaacttgaagggttactgacgtgtaaatgctggtatttgatttcctgtgtgtgttgccctggcattaagggcattttacccttgcagttttactaaaacactgaaaaatattccaagcttcatattaaccctacctgtcaacgtaacgatttcatgaacgttattatattgtcgaattcctactgacaacattataactgtatgggagcttaactttataaggaaatgtattttgacactggtatcttattaaagtattctgatcctaccactgctggtggctcttatttcctgtggatttatcatgggctatgccaatgtaaagtgaagtattaagtcgttcatataaattgaacattagcacagacctttatgagactactgaagtgagctgataagactggtgaaggaaagactgtgttaaatacttggtagttgcctaagtctgaaaattcatattgtatcttccatatttctgcaagtatttttctatctatctatctatgtgcctcggggccattttttgtatcctatggggaacccaaggaaagaagtcatggtctctgctttcagaaaattacatgaagtcgtttgagagccacactgttctgtatattcacatagtgcactttgggatggaggtcccgaagggaaaggggcagcctgggcattaggacttcaatttggaggcggctgggctggagtagggtcttcccaggtagactgtgattgggaagagcagagatcccctcggccagagacagagcacagtgaaagcccagaactggacatgagcatgatatgttccccaattcaaatttcacttttccagatcatgacctgcttgtgagcagacctttgtctccatggagag

SEQ ID NO: 40 - DNA, 144994 bp, Homo sapiens
atttaggttgacagaaagagggctaatacttgaaaaaaatccctacacgatctggtgccaggctacttctttggcctcacctcttaccactgccccctccttccgtgtcctccagccacagtgacctctttcctgatccttgaacttgccaaacactttcccttctcaaggtctttgccttcaggagtccctctgcctgaaattcttttcccagatagtcatgggactggttcattctcatccttcagatctctgctcaaatgtcacttattctaggaaatcgttcctggccaccgtaaaatagcacaccccctcctcactttctactccttttctttgttattatgtatatggcagcagaaaactatgcattttcttagtggcaattacacaccccgcacattatgcatttaaagcgttgtttgttgttttgtcgcttccatcagaatacaatccagtagggcaaggagtgtgtggggtcgtgttcacctggtatctctggggacctacagcccggcacctagtagacactcagtaaatatttgaatgaatgaatgaggccctttggcagccgggaagcccgtcacagccgttgtctccaccctctcccgggctacaccaggccacgccggtaaagttgtttctcctctaggagaaacattcgctaggccttgttgccaacccgcaggcggctgggcgcttcatcccaccctcacccctttccagccaaggtggctgatgggagtcaggctctcgagggcgcattgccacgaaacagcgtgtgtgagcgcgttgtccccggcccccggcgccacttcccctcggcctagcagcctggactggggaaggacgggtctgctgtacccgggaggtggaaggaaaagccgaaagcggagaagtgtgcgggaggggagtctccgcgcggaggcagcccggcctcctccagtgcaggctgcgcgctggggagccagccagggtgagtcactcccggccgcttccctggagggcggcggccacacacacacccgcccatctagtgagggccgggcccagcgctggcgcctagctccagccgggcaccagcgtttcgcgaggcgccgccgccttaacttccttgcgcgctcacgcccaggggccgtcccaggaatctccacgcgcgctcgccggcttcccgagaggcagctgccctgcgtggcccgcgcctgccggtcccgcgaccagcaccgagcggcgcacgcgcactgcaggacgcgcgtccggctctcccccagcctctatccggcccggtctcctgccattcggggagactgcaggccaaccgggaggctgagttcgaagctagcagggcggcgaagccagtgtcgcccgcggcgttgagaagacggtgtggccccggagagggtggagacaactgtgacgggcttcccggctgcccgaagtgggagtggtgtggggctgcaggaaggagagaggaagaggagcagaagggggcagcagcggacgccgctaacggcctccctcggcgctgacaggctgggccggcgcccggctcgcttgggtgttcgcgtcgccacttcggcttctcggccggtcgggcccctcggcccgggcttgcggcgcgcgtcggggctgagggctgctgcggcgcagggagaggcctggtcctcgctgccgagggatgtgagtgggagctgagcccacactggagggcccccgagggcccagcctggaggtcgttcagagccgtgcccgtcccggggcttcgcagaccttgacccgccgggtaggagccgcccctgcgggctcgagggcgcgctctggtcgcccgatctgtgtagccggtgggtgttatctctgcctggcttctgggtggggggcagcagctgtctctccacccccttcctaccttttggtcccgcctgccccctgctagtggcagcaaacttctgagccagaaaaatcttcctctttaagacgacacctagaacgagtcttgctggtgatatttgcttccatttgtgtcttataattccctcgctcccgcctccttattcctttttaaaattttctagacacttaaacagcctagaaaaagcatttgtttcccctggatttatgtggtagtagttaactgctgcttctgtttttaggtttcagaagcaggcaacaggaacaagatgtgaactgtttctcttctgcagaaaaagaggctcttcctcctcctcccgcgacggtgggtgtgctgtcctttatcgctgcagtaaaggcgaaggtgtctggagctgggagtgcgtgcgtagggaaggttggaagcgtgtgaagagaggcagggctcattgttgcttactcttctgaaaatgtcagtgctaaacttttaatgttgatctgggagagtaattttggggtgttttgttgttcgtcttggatcctttaagaaacatttttttgttggctttacacataacgtgactttgcagagaaacgaaaaacgttgtccattaccctttcttcttaagcagccagagattcttaatcctttaaagaggagtatttccaagcaataagagatagcttttgggagaacacgttagctattcttgctggggtttctgctaccacattgaatgtttcctcatggttttatctgcctaagcttgctgtgtcggttgaatttacccagtttgttttccagtaattactaatctgttaggagaaactccatttctctgaatgaaagggtaggagcggctgagtatggagaaggaaactggaagtgggaataagggaaatgattgcttttggtttcataataagtttgtacagtgagttgttgggctactgcaaataaagattttgtatcccttctccagaatgcttgggaccaaaagtgttttggattttttttaaaaattttggaatgtttgcatatacaaaatcagacatcttgaggatgggacccaagtgtaaatacgaaattcgtttgtttcatatagaccttattcacacagccactaagtcatttgcaatatttttaatacgtctgtgcatgaaacaaagtttgtattaagtacctatgcggggaattttccccttgtagcatcatgttggtgctcaaaatgtttcagattttgcagcttttcagataagggatgatcagcttgtattttgatataacacccagaacatttgaagatgaataatcaatttttggcctcccttcccccatccgcctcaccttataccactttaagtgtgagaattatttgcttgtacatgcatttgtctgttggtgtgtaacgtatgtacagactggatgtatccagcacttgccttaatagtacatgtatttacctgaataggaaagctgcagtacttgctggccagaagagcacaccatgcttgtttttgctctaactgaatatcctgtatttgcaatttatagcagttttagggactcattagggaattttgtgtgtgtgtgcctttggtgatttgagacaggtgtctcagatatgggaagggaatatgacattgtttctctttcacctggctattactgaaaggtgggatgcttttgaggcagaataggaaagtgcattggctttggagtgagatctggatttgaatcctggtgttcttgccacttaagagttgcattatttacggctggtcatggtggctcacgcctgtaatcccagcactttgggaggctgaggaaggaggatcacttgaggtgaggagcttgagaccagcctggccaacatggtgaaaccccatctctactaaaaatacaaaaattagccgggcgtggtggtgcacacctgtaatcccagctactcgggagggtgaggcaggagaattgcttgaacctgggaagtggtggttgcagtgagccgagatctcaccactgcactccaggctgggcaacacagcaagactctgtctaaaaaaaaaaaaaaaaagaaagaaaaaaagagttatattatttacgactcttttagcttcactttcttataagattgttgtgagaagtgagtaagacacatgcaaagtggtaaactgcctggctgtcataaaagtcttggctactatcacggctgggaggcaaaggagattcagagaagggcagaatgactgcataaggtgatctgcctgtaactcgtgtttcctcctttctagtataaagagataaaggacttcaaggtcttaaactggtgagggagtattacagcctttgtatggaaaggtttgactttgtgtctctgcttaaacccccattgtgttgcccctaccaattattgtgctgcccccttgtggttaactgtgctaagacctttcttttgctcttctcccattacatttcccacccttccccactcccttttagacccctcctcttagctcccagtttcccaaactgtgtgccaaggtgcccagagcacctcaggcttgaacttgtgttttgagttggttcatggtttcaatattagatacctacacccgtttctacaatgtcatgtctttgtaaagatgtattttcagaggttgctccgataaaaagcaactactacatgaaaatgaatgtagaacaggaaatgacagtgtggtattgtccaatttgattctaaggtttgataagttctacagtgctctacactaagttgtaaggacataactactaagtaagttgttcaaacctatttcttttggcctgggggtgtcgtgaaaaatttgctaagactcagagctccctgaatgggtttggaaacctctgccttagcttttagtttgcttttctgataaaattattgatataaagctagtaccagctgatcatggcttaatatatttcctctcctatgtaatatgtttataacttctgcccagttctttcattttaaaactaatcctattgctaacttgttgtactagtcacttcctggtttttcctgtactggtcttctgcttctacttctgttcatctccttaaactccgaatgccccaagtgaaagttaccattttctaccccttaattttcttctaatcatgtaggctttaaattaggcatcatctttaaactacttctttcatttacctcttattcccattcaaaatgtccatatttcctttctttctcatatctctgctttccctcctttactgtgtgaatcccaggacacatttcctgagcctagaatattgaaagtcatttgaacttctgagaattcagtgtcccttccttctgtttatcctcaatagagattccactctaatactccttattatagcattcccttgccccaaaaccttcagtggcttaccattttctacttattaaattttcctgacttttaagatagtctattatcaatccctgccctatttatttagtcttttgtctaaggatctctagtccttaagcttgtaagctgatttccacactttctaataataagctatgcttcttctatcctttaatttttgcccatgttctccatccctcttttttttcctctatttctgtagctctttagtcttagaacattttcacatggtttaattatatgccatgctttagttgtttgatagttatttccctagtgttagccatatcttttcaagttgattgtgtattctttgaggagcagtaccttagattaaaaaaaaaccacaacacacagtggagagcacatgggcagcattcaagaaatacatgttgattgtgtgataaggaactgtagtcaccaaacaaatatttgttaatacttgcaatgtaaaaggtacttggctgtattcaaaagagaaataaagaaatataaaataggctcctttccctaaggacttacagtataattgggcagataagctaaataataaaagttacagatatttaagaccacttgagttgagcagagattttgcataataggaaggaactggtagagggggtaagcaaaggcaaaatatgtatatatgtatgatatgttcagagagcagtacataaataacttgactgaaatgaagatttgtgtgaaagagtagtaagaaattgtgttaaaaatgtagttggaatttgattatggatgtctttaaatgctaggatgagaagaatgtactttgacctgtagatatggagaagctttaaaagttttgaattgagaaagagtttgctgaaataagtattttaggaaaatcaaagcagcaccagtgctaggtctcatatgaattggaaagagaatggtagaaagaggtaggaaaataattgagccctgaagtaatgaggacttagaaataagtcagattgcagagatgtcacaagacattattatggattggataagaagggagaatggaggggagaagagtgattaaagattaccttaccttgaaggtttgcttttcagtgacggaggaaatcaaagagtgttgactctccaagacatcttagaacatctaagtctatatgttttgtatattaggactcagaccagagagatttaaaaatgtgtccaaagttactcagctagttaatgacaaagaaactgccgtttgattaatggcagttactaacaaaaatagttatggcagtgttagtagctggtagaggggatgtagacagttgagcgtatattgtggatatgttgagtttgcggtggccgtgggatgggcaagtgaaaattgatagcatacagtgggacatatgactagaatttgttagcgaagttaaggctggtgctgtggtacttaagagaaaagagtgggattgcccataattagcgggtgggtgaaaggagaggaatgggtaaaggagacaaagaaaaaaacagtatgagaggcaaattagtggataggttaggaggcggaatgatcaacatgttgatcattggcaagaaatgagaagaatcagatccaaaaaaaggtcttaaaaagatgtattcgtgtttttcctaataagaaatctataaaaacagaagaaaattgcttatactttccctacgtggaaataaccactgttaatattttgttctctccggtttaacaaaagacctttggatttgacagttgggtgatcagtggagacttttccaaagctctccatcactaggactaaggatgagaattttaggcataataaaacctaggagatatttttcaacagattgtcattcgtctgtatcgtcttatatatcacactgtccaggtactattcttcctgtgtgcattggttctgtgtttttttctgaatgatagaaggttagacaagccatctctgggtgcttttgtgctggtaaaatttgaataaagtgataaaatatttgtttctaaaaggaaggagaaattcttggtcgataacttataaatctgagggttgaatgattgatgaaattaggggtactggaaagaacaaagagaagcattatttattttgaagcttttctgtatagttacaaagggttaactaggttagaatggtccatgggctgtttactttgcttgcatgtttattttgatcttcccaagaacattcttctgttcatctttttagtatgttattggaaacagagtactcattagttcttactaagtggttttagtttaataaattatgattatgaaataaaatgctattaggtaatatttttataatataaagggccatgtgatgtgagtaagtgcactgttttggaaatcaggggataagggactgaccctgctctcagcatggtatatgatttcaggcaactcacgtaatcagtgagtcttgtctattgagggaatggactaaatcttttctagaaaatttaaaaaggtgggatcacatggtaaaatgtgtataaagtttaaaaaggaaatggtttaccaatgtttatgacaaaaaccagcaaactctttcccacccccccaccccacatctccttttctagtctctaattcctgtacaccaggcaaccacctgtcctctgtactttgccgttttcacctttataatgaatgaattgtttagcatcccctctaaagcctctccattcagttgtgtagaagagctcatcccctttgccttcaagggctttaccattatatttctctcctctttttcttgccttctcaattcttccctctactggattatttccatcagcattactctgattgctattgctgtgtaacagaaactacccaaaacttagtgatttaaaacaactactttattaggctcacagataccatgggtcagtaattgagacagggcacaccagggatgactttgtttttgctccacaatggctactaggacatgagttgggaagaattgccagccaggggtgacttgaaggcaaaggactggaatcatctggaggtgtcttcactcacatgatgggtagttgatgctggctcttgactgggatgttagctgggctgttaactggagcatgtacatgtggcctggatttcctcacaatatggtggcttcagggtggtcacctttcatagtggtgagtagagaattaaaagtgagtgtgtctcagcataaatcttttatgatttagccttggtagctgcacagtataacttctgccatgtcctactggttgtaagggtcagaagcctgtccagatttgatgggggagtggcaagttcacactgcagaagaaaaacatgtgagatgggaaatagtgttatggccatctttggacaattattaatactattgccatagtttgccattttgccaaacttcacatccctcctgtatctgaaatacacgcaaaatacactgagcttctcctcaaaggtccctaattcacatcccatcatgacagtaactcagagtccagtatctcatcatataaatcaggtccaggtacagaatagttttcttgggtatggttaattggatatggttcttcttgaactgaggacccatgaagagacagtttatatgtcccctgcatactttacaaaatggaaaaggcacaggttatctgcagtagacattcctcctcaagaagcatgcaaggtaggcacagtctgtagcaattctgcaacctcactgggcacatgttgccagttccttgattaggtctcagtcctgcttcctggaagtcattcttaataggacataggcttcttctgtttttgggtttaccttctgaattatttatctcccccacccctgcacccaacccatataaattgctttgtatttgtaagagtagctttctgagcttgcttcctgcctgtagtgctccagagtccaaaggcccccttttatatagcaactgtccctttcattccaagctaatacaactcctttaaaaactttgtggacttcctgtgtgtaagtttataatctgtactgccatacccacaaatctcttttgagaggaactctttcctcccctaagctctgtgtgagtctgctgtgggacaacacccttaagatccttagataatatttcgtctgaaaggatctatgaggtactgatttagatcttaagaaaggatcttataatcacactctagattggatctttgctctgaggccctttttatttgacactttgctggctgaaaagattgttctgagtccattacatctccttgaaattctactcaaaaaatgaatagcttattctttagttcatctctctgttctctcaattataagggcagctagaagaagccaaattgctttaacttcctgctgagaatctccttaattcattaggtcaggtatgtattttattttccatgttaatgtaggtgacagttttgctaaactttgccctagtatgtaacaagggtgtcctcttattcagctttcactatcatttctctcactttgcttgaagtcctcactgacagtctccttgagggctcttaggctcccatgaagtttcctcaagaccctttacatgtgtgaacacaaagggtccttatctgttcctggctatatagcaggtccttgaataactgtcatttcttcataacgttgataagaaaaaaatggattcctggctggggccactgtttgtgtggagtttggacattctccccacgtctgtgtgggtttttccgggtgctccaatttcctcccacattccaaagatgcatatgttagtggatcggtgtgtctaaatggtctcagactgagtgatcatgtatggatgagtgtgccttgcagtgggtgatgtcctgtctagggttggttcccaccttgtgccttgagttgctaggataggctctagccactcgtgactgaactgaattgggttaataattatcctacttgtttttattagtctttcttaaatgtgtgtatagctcacatttatttcagtgtttaataatcagagtgtttggaatctttacttagaagtttgatgatgtttttgtggccataaatatgccataggaacttccttatctcaattagcctatggaaaaatggattttgttacacattgtttcacttaaagtcacagtttccaagaacctattgaagacagtgaggattaactgtactagaactgtttcctaacccactggttcttatcagaattacctaaaggacttattgaaacacaaattgccgctgggccccacccccagagtttgtttcattagctctggagtgggacttgaggatttgcatctgtgagttcccaggtgatctgataatgttgatctggggcctagattgtgagaattactgatttaaaccagggattggcaagatttttctattaaggatcataaataaaatattttagactttgtgggcaagattgtttctcttgcacctactcaattccgcctttgtggtgcaaaagcagttatagacaatacgtaaatgaacagacgtggctcatggctgtgttctcataaagctttatttacataacaggcagctggctaaatttggtatgtgtgaactgtgctctgccaattcccaatttaaatcattacttgactccacatctcttcaagctatggccccatttttcactcccctttggaacaaaactctctgagagttgtctgtatttgtctctttttattctttcataaaaaaattatctattttttgaacacatttaaatgtcttagaattcaaaaagtagtaaatatctttgtacatttgtcagggcgtgtgtgtgtgtgtgactataactaaagattaagtagaagaggagttgctgattcaaaagtggtatatgttactaagttcaacaaatattgccaaattgacatagaaataccaagttatgcttttctacacctttactaacattgtgttttcagatgacttgattgttgccaacttgagacgtgaaaaatagaatctcattataattttaatttgctttttattctccttttttagggaactcttcactcatatcttggcccactttctattggatttgtggtccttttactttgctttgtgggagctcttatactaaggaagatagctttgagtttgcgaaatgagttgttttccctaggttgtctctttatctttttgattctgtagatagtgtgattttgttgttgtgcatctaggtaggttccttctaaccctgaaattatattttgagattctcccttgttttcttgttccatctggaatttatactgatgcaagatataagatgggacgcaacttttttcccctagatggttgtccagtttcaatactatttgtcagataatccttcttttctctgctgctgtgaaatgctggtgttttaaattgtgtatgtagttggatctatttctggactttgtttcattctaaaaatggctcctctgaaaccatattgtgagttcttgggtagtgaacatttctatttatttgtttccaagtcctgtataatatttattagcatatgggaggcattcaagtacttgaaaataaaatgaataaatcaagcatttaggaatagaagcagatctttttgccaattattcattttagttattctatttaattctctatttctgattttaaacttgaatttaaccttggttttccattttagttttaccttttttttaaactttattgtgaagtattaagttattttttgtacttactgaatgggcatttgctaacttatgtgtctgctcttattagtctatttttggcctcaaattgttaaaaattcacagtatagttttatttgtatcaaatttgctactgagggaagcttgtcatttcataatggcaatccataggataggtcaagtcatttgagattggaaccattaaggataagttcatttaacattgaattattagatctgtggttaattggccaggttagagaagacagaattacagggaagtctggattttacaacttattattttagagggtcaaatttagaataatatttttaagctttttaagtagaagtatatggatcacctgaggtcaggagttcaccaccagcctgactaacatggtgaaaccctgtctctactaaatacaaaaaaatagccaggtgtggtggtgcatgcctgtaatctgagctacttgggaggctgagacaggagaatcgcttgtacctgggaggcagaggttgcagtgagctgagatcgtgccattgcactctagcctgggcaacaagagtgaaactctgtctcaaaaaataaataaataaataaataaaaataaatacataaatagaagtatactattctgattctcttatttatatgtataatttatttttttaaatacatgaggtattgtagattttttggtttttttgaggaggggcgggggtgatgtgaaatatagttttcattgcatcagatcttcagttgtaatgatattgctggaatccaccatttaggaccctgtcttgttaaaaaaaaattatccttgccttcacccctacccctccctgccacagacttttaaaggtaagtattctgcgataattggattatatttactattatgaaaatttaaaattattagaagtaaaatgaaatatacctccattgtagtaagtttgattcacagtgcctctggttatggtggtcagtaaaagtaacactgtattaggaacagtcttcatggtgggagttctctccttttactcttctgttagtttgttctttttttttttttttttttttgagatggtttcactgtcactcaggctggaggacagtggctcgatcacggctcactgcagccttgccttccctggggtccagtgatcctcctacctcagcctcctgagtagctggcactgcaggcgagtgccactaggcctggctaatttttatatttttttttgtagagatggggtttcaccgtgtcactcagtctggtcttgaactcctgggctccagcaatctttctgcatcagcctcccaaagtgctgggattatggttctggagccaccgcgcatggcctgttagtctgttcttgcattgctataaagaaatacctgaggctgagtaatttataaagaaaagagatttaattggctcatggttctgcaggcttacaagcatggggctgacatttgctcagcttctggggagtcctccgggagcttttactcatggtcaaaagctaagagggagcaggaatatcacatttcaagagctggagcaaaagagaatgtggggaaggtgcacacacttttaaacagccaaatcttgcaagaactcagtatcttcaggacagcaccaagggggatgttgctaaaccattcatgagaaatccacccccatgatcaagtcacctcccaccaggcctcacctccaacattggggattacagtgcaacacatgaaatttaaaggggacaacatccaaactgtatcaaccttgctgtacccctcagcctcattttataggcaacaattgaatatattggttttataaaggtttgatatggaaagattcattaggagtggattttaggacttggggaatgactcagagaagaaaatagtgcatgatagtataagtctatctgattgatgagtaactggaaatccttccaaaacataatgcttcagtgtctgcagaattgtttcatttccatgtttatgtatttcttattgtttccttgtttatccataggtgcttaatttttttttaatctgaatgcattatgataatctttaaataattatttcagaggaatatctgaaatattcagtgttcttctagcatggcagtattttaaaaatcattatgagcttaaattcatactgatttaaacaacttctagatttttttgaatatcaatagcagagggtagttttaaatatttcacgagcagaattaattaaatttcctgtgcaattttattttttatagacaaactcgtcacttcttaaaatcttttaaaaatgtcttggtaatacaggcttggaatatgatggtattgaaatgagatcttaagggaaaaaaaactccaacgggtttttttgttgttgttgttgagatggagtcttgctctgtcacccaggctggagtgcagtggcattatctcagctcactgcaacttctgcctcccagattcaagcaattctcctacctcagcctcccgagtaactgggattataggcgcgcaccaccacgcccagctaatttttgtatttttagtagagacggggtttcaccatgttggtcaggctggtctcgaactcctgacctcgtgatccgcccgccttggcctcccaaagtgctgggattacaggcatgagccaccatgcccggccaaaaactccaacttttagaggcctatttacagcacttgtcccatatttgttcacactttttctgtatgtgtgttgtgaattataaatctggcttttcctacaaatgtggcttttcctgtgtagtcatcattaagcatgattctaagaagtagctcaaaatctcctaagaccaaaaaccacaaaaaacaaaaaaaaaaacaacaaaaaaccaaaaccagaaaagggatacattttgcagaataatttatattttcttctcttcatggcatcagttttctcaggagttctttttttgagatggagtctccctctgtcacccaggctgtagtgcagtggtgcgatctgcaagctccgcctcccgggttcacgccattctcctgcctcagcctccggagtagctgggactacaggtgcccgccaccacgcccggctatttttttttttgtattttcagtagagacggggtttcaccgtgttagccaggatggtctcgatctcctgaccttgtgatccacctgcctcggcctcccaaagtgctgggattacaggcgtgagccaccgcacccgggctcaggaggtcttttaagcttttgcctgtcatgtgtgtacttctgacgctggcccaaggtaaaatgattacatttgacttcggtagcccttaaatgtatggctgttcttaatcttttctaaagcctaaaagttgaattagtattcatcttagatttcttgtttcttaagtgaaagaatcatgacattgtattaaaatatcttatttgcatgtattttatatactgttttaataggcagtagtagtatacaagctttgaccaaatgtctcttcatataaaaaattcaagtgaataaaaacagtcatttaaaaatgacattagtcaaaggggcaaaaaagattacaaatgcttattgtgattgacagaacttgcttaacatattagggttctctagaaggacagaactaataggatatatatatgagtttattaaatattaacttaaatgatcacaaggtcccacaataggctgtctgcaagcttgaggagcaaggagagccagttcaagtctcaaaactgaagaacttggagtctgatgttcaagggcaggaagcgtcttggctaatccacccatcttggcctcccaaagtgctaggattacaggcgtgagcccccgtgcctggtgtacatcatttttaatatctttatagtattctgttggctaagttgccacaatttatcagacccctttaatgtcattaattttttcccaatatttagacttgtttcatagaattattagatatgcatgctactactcctgtcctttttcaaaggacaattattagatattcttgttttcctcatatctttgccaacactgggtattggcattcttcttgtttaccagtcagctaaggaagctaaggaagaaacaatatctcatttttatgtacttttctctgattcttaattatgttgaccatgttttcatttcttttgtgaaatgcctatttatgttcattttcatattaaattgtaagagttacttgtataaatatattaaacctttgtagtatatattttttctgtttttttttaaagttttgattatagtgtttataatatgcagtcaaatttacccatcttttatttcctctatcatttttcacttagatgtggggtttagaaaggaggtacataatgtgacagagtttttggtatagaaataactgacatagttagatataaaacataccaaggaaatagtcggaaatgtccaatttcgaatgtgtaaggagaccagtaagaaaatcatgaagaacagctaacagcagtaatttttaaaagggtatttacaaacacttgaaaatgtttatgtagtttaaaggaatgattcaaatataaagagaagcgtaacataaaaatgaaataaaggcatatatatagtcattgtgtagatggttttctagtaacagttataccaagtttgaaatgatttttaggctttgttatgccaacttttaggagttttctttttaaactttttgagcttatgtttcatcatggccaatttttataaattttccctatatgctcaaaacatttttttagtggaaggttttaatacgtctgtaatttctccggtgtcttaaaaataattagtttgtggagctctttgtgtattggagataccatcttcttgtttgatatatttgtatatgtattaagtaagaactggataaagaaggtggttgggatatgtataaatatcaggtaagaacttgataacgtattggttggtttgcatatgaaaagttgccctcactgtcaggttctttcctgtttctaggaattggctagccctggaaggactgccccttccagggtcagcaaattcccaagatagcaaagcatcaaaaatacagaataaaaagacatgcttagtagagtatatagaaatacaattggttttgtttattttgtgatgtatcctgtgatactggtaaattcatttataagttctagtaattttttggtagaatcctcagcatttttgataaatacaatcatgtctgcaaataaaaagttttatttctttcatttcaatctctatgtcttttatttcattttcttaccagattgcattaggtagaacctccagtgttgaatagaaatggtggtggtgagcatcctttccttgttcctgattttatggagaaagcattcaatatgtaatcattaagtaatagaaggttgtttgtagatgatctttattttattgaggaaattcccttctttttctaatttatttccagaaattttatcatgaattggtgttgacttttgtcaaatgcttttcctgcaacaattgggacgatcttatggttttgctccattattctgttaatgaggtaaattgcattgattcattttcaaatgtcaaagcaaccagtatgactggaataaaacccacttggtgatggtgttctgacctttttatatgctcctggttctatgttctattattttgttatgttcatgagaaacatttgcctgtaatttttttttttttttatgatgtgtttttgccaggttttggtattaggataattctggccacataaaatgatttggaaattatttctgcccctctgttttctgtaagagtttatacagaattggtactattttttccttaaatagttgacagactttcccagggaagtcactttggccaagagttttctttgtgggtatgtttttaatgaagaattcaatttattgaagagatatgatactattcaaggtttctgtttcttcctatgtcagttttggtaatttttgtctttcaaggaatttgttcatcaaatctaacttgttaaagtcattggcatgaagttgctcctatctttttatatccacttactgtttataaaatctgtagcgatatcctgctttttttacatcatatggggcacatattggtaatatgtgttcttttctgtttgtaaattgatcatcttagaggtttatcaactttttaaatcttttctaaaaacaaagttttggtttgattgattttctttattgttttatatattattaatttttgttctttattctttcttcactctctggttttgttttctagctacctaggaagcttacataattaatttcatatctttcttcttttccatcataagcatttatagctatacattctctctaaccactattttagctgtattcccccaaattttattgtttattatcattcaggtgaaaataatttctgatttcccttttaatttcttcttcgaacctgggattatttagaactatgttaattttgcaatactgggagattttctagatagttttttgatatttatttctaattcaattttgctatggccaagaatataattcatattaattcagtcttttcaaatgtttgagaattggtttatggaccaacctatggtataacttagtgaatgttctgtgagcacttgaaaaggatgtatgttctgcagttgttgggcattgtgttctgtaaatgtcagttatatttagttggttgatgtttaggtcttcattatttttactgattaaaaaaattttttttgttaattcctgagaaatgagtattgaaatttttagtgtaatagttgttttatttccctctttacatttttgcttcatgtaattggaaactattattgtgtgcatatatatttaagaagagtaatttataaatcttctatgattagtgtttttatgttctgcttacaagaggtcacattggtctgttttccatcttaaattaatatttgtgtaccgtatgaagtagatagaagttaaggttattttttgccccatatgaataaccagttgactaagccacatgttttgaaatgaccaatatttcttcactgaaatgcaatggcacatctgttccaaattaggtaactgtatgtgagtatgtttttttggactctattctgttccatttgtctatttgttcatttttgtgctaataccaatctgcttgttctatctttatgataaatcttgatgtctgataatataaatctttagtttgctcttcaagattgttttggctattgtaaatcctttgtttttcacagactttaggatcaacttgtaaatttccacaaaaactgctaggattttaattggaagtgggttgaatctatagattaatttggaaaagaaccgacatctgaaccatactgagtttttctgtattcttatatcagcatggtctatccctctcttatttagctagcatttattttttgtagaaatgttttacagtttttattgcacagtttttacagatatttccatagatgtattcctaggtatttgattttttgttactattgtaaatgatactatttttaaatgttcatttaaaaaattgtttgcttctgacatacagaaatgcagttgatttttatatattggtcttgcatcttgtgactttgctaaattcactcagtgattggtagattcttttaaatttcctacatatacagacatgtcctctatgaatactgacaattttacttatcctttctaatcatcataacttttatttagttttcttgccttattgcactagccacaatgtccactatggtattgaatagaaatcatgattttagacatgattgttacgtttttgaactctagaagaacaagatcaatattttaccattaggtatattgtttttttactgttaccctttatcagagtgaggaagtttgcttttattcctagtttgagattttaaaatcatgaacattggttaaattttattaggagtagtttctgcatctattgaaatgatcatatggtgtgttttctcattgtgctaataatgtaaaatatattgactatttaaaaaatttttttctaaattacataaaaattgtatatatggtgtacaacatgacattttgttatatgtatacattgcagaatggcaaaatcagtctaattaacatatgtatcacctcacatacttatcttttgtggtgagaacacttaaaatctactcttagcaattttcaagtatacgatatattgttattggtaatcaccatgatgtacaatagatctcttcagtttactcctcctatctaacagaaatttcgtatcctttgaccaacgtctcccattcctcctaatgggaccctcagcctctggtaactgctgttctacttactctctgcttctatgatttctacttttttagattctatggatcagtgagatcatacagttttgtctttctgtgcctagctttatttcacttaatataatgtcttccaggttcatccatgttgttgtaaatgacaagattttcttctttttttaaggctgaattatattctattgtgtacatatgctgtattttctttatcagttcatctgttgatggacacttaggttgattctttatcttggctattaagaataatgctgcaatgagcatgggagtgtagatattgctttgacatattatttttagttccaatacccagaagtgggattgctaaatcatatggtagttccattttaattttttgaggaacctccattcattttccatagtgactgtaaaaatttacattttcccaccaagagtatacaagagtttctttttctccacacactcaccaatgcttgttatccttatatctttttgataaggctcattgtaacaggcatgaggtgagatctcactatggttttaatttgcatttagtgatgttgaacgttttttcatgaacatgttggccatttacatattgtcttttttttttttttttgagacagagtcttgctctgttgcctaggctgaagtgcagtggtgtgatcatagctcactgcagccttgacctcccaagcgcaagtgatcctcctccttcagcctcttgagtagttgggactgcaggcatgtgccagcatgcctggctaatttttttttttttttttttttttttttttttttttttttttttttttttaggtacagggtctcactgtgttgcccaggctggtcttgaactcctggtctcaagtaatcctcccaccttggcctcccaaagttttgggattacagggttgagccactgcacccagtctgtattgtcctttgaggaatatctgttccggtcctttgcccatttttaaatcaggttatttgttttcttgcttttgagttgtttgcatttcttatctattttggatattaactccttatcatatggatggcttgaaaatattttctcctgttttataggttgtcccttcactctgttaattgtttcccttgctgtgtacaagtttttaaatctggtataatgattgatttctaaatgttaactttgcactcctgggggtaaattcatttggtcaagatgtattcttttaaagtgttattggatttaatttgctagtattttgtttagcatttttttccaaatatgtttatgagagagattccagtgtaatttttttccttttcatgtccttacatattttggtatcatgtttatactctcattttaagaatgtgggtaagtgttttttattttctatttcctgagagagtttgtataagctcaatgtttcttcctcagacatttggaaaaatttaccagcaaagtcactgggcattacattttctatgtggaaaagttttaaatggtatattctgagggctctgttctgttccattgatctatatctctgttttgctaccagtaccatgctgttttggttactgtagccttgtagtatagtttgaagtcaggtagcgtgatgcctccagctttgttcttttggcttaggattgacctggcgatgcaggctcttttttggttccatatgaactttaaagtagttttttccaattctgtgaagaaagtcattggtagcttgatggggatggcattgaatctataaatgaccttgggcagtatggccattttcacgatattgattcttcctacccatgagcatggaatgttcttccatttgtttgtatcctcttttatttcattgagcagtggtttgtagttctccttgaagaggtccttcacatcccttgtaagttggattcctaggtattttattctctttgaagcaattgtgaacgggagttcactcatgatttggctctctgtgtgttattggtgtataagaatgcttgtgatttttgtacattgattttgtatgctgagactttgctgaagttgcttatcagcttaaggagattttgggctgagacaatggggttttctagatatacaatcatggtatattcaatttttaaattactgtatttgtttgttctcatattgctataaagagctatctgagactgggtagtttttaaagaaaagttgtttaattgactcatggttccataggctgtacacaaggcatggctgggaaggcctcaggaaatttacaatcatggtagaaggtgaaggggaaaaaagtacatcttcatacagcaacaggaaagagacagcaaaggacgacatgctgcaaaaatttaaataaccagatctcatgcaaactcactcactatcatgagactagcaaagcgtaaatccatcccatgacccagtcacctctcaccaggccactcctctaacactgaagatcataattcaacatgagatttgggtggggacacagaaccaaaccatatcaattatatatagaattattcaaattttatatttcttcttgtgctagtttaggtaaattgttttaaaaggaacttcatttgtttttaaattggagaatattcctgttgtcttttacatgtttcaatattgtaagctctggtaataatgtctactttttaattcccgatattgataatttatgttttatcttctttttttcttgatcagtctttctagtgttttatcaattttaatgcttttaaaaagccaacgttttactttgcttttctttattttatttttatttttctctgatttctgctcttaagtactttcatttttatggtttttggcttaatttgttgcaacttcttgaaatgaaaatttatttaataacattgttcagcctttcttctcgtcttgtgtatgaatttaagattatgaatatcttagtatacacttttactgcgttttactcattttcattattgattcaaagtatttttaaagttattctttgtaccatgggttctatgaaaatatattgattaatttacaaatatatgcgggtttctagttatttttctgtatatgctgtggtacttttgtcagtggttatattttccataagagatttttaatttaggtgccattggcaaatttccattaattcaaatgcagaacttcacatttttcaatgcatacgtgagttttttttgttgaggtattaagaatagcataaatttataaaatattaagtaatcattgaatgcaaaatatgtcctattttgcaacttaatatacttttattaggttgacgctaaagtaattgcgttttttactcatactttaatggcaaaaaccacaattacttttgcaccagtctaataatgagaattattattattattatattgtcttttttttttttggagtggagtctcactctgtcacccaggctgaactgcagtggtgtgatatctgagccttggctcactgcaatctctgcctcccaggttcaagcaattctcctatctcagcctcccaagtagctgggattacaggcacgtgccaccacgcctggctaatttttgtgttttcactggagaacagggtctcactacattggcctggctggcctggaattcctgacctcaaatgatccccccgcctcggcctcccaaagtgctgggattacaggcatgagccaccgcgcctggccctaataatgagaattcttatcaaactgtttacacagaataacatgagtgggtaatggtgaagctgagtttcacatttttatgcgatattcttcagtgttgctatttgttcagtacttttaagaattatataaattttttatagtctatacataaagtcaatattatgggtcccaaatatataaaatgtttgcttgttccattgtttatgttttgaatacaaattatattttgtatgatttcattaataatttgttgagaattttatggcctaacatgtggtctactttctaaaatattccagcttcatttgaaaaggatatgcattcttcagttgttaggtgtttgcttttgattgcttgtatttctcagtcaaatgtaggaagtggagattaagaaaagggctggcacttttggtgattgaggaggagaaagtatgagatagttgtcttggatagtggaagagtaaatgttctaaagaaatataaaatgatagttgagcagcactaagggcccatttgagtatgaatctaaagagggaccaatctgaatgcatgtgttttcatcagtgatttttatatgtgtgggtaaaagctctgagtagacagagataaactgaactcttttagagtttctttgttatctttggtgtttggatcctttgctttgatttgtatcggtacagtttttaaaaaattaaatgttatctcctctcagcagatctttttaacatgaacccagcatctttaacaccaataaaatttcttctattatttttcttccctgtgttttcattcgtcctccatctagagcttctctttagaattgtactccctggattgatcctcttatttcttacttttatgctcataatatttttttctttctgtctgtctctttctctttctgagtctaggacctgggagtttgtcttgactgtcttccaaattatgagtttgatcctttgagtcgtattattcaactctttcactgaattgtcatctatctctttttctttaatgtatagagaatttattatgcacagccacttgcaaactttaacaagtatgattagagcagcattttctataacagcaacacataagttggaacaacacaaatcttaaaataactggaatggatgagcaaattgggtggtccgaggctcagacatcagcaggtgttaaacacctgtgggaaaggagagaacgatccatttatttatttctataggaaatgcaaaagaggcaaaattaagaaaaatactgcttcatgataaagaataaagccgtgaagaatatccacaaaattgtgtatagtggctacatctgatacagaatggaaacagccaggatagagcagcacaggaacactatgaaatgcccaggctgtcttcattactagtcaggatttttttttttaattttgtaaactttatttattctctgctcctttttcataatctagtgatgctttatgttttcaaaatattcttaaatctctctgagaataccgagaaagattttaaaccaagttatcttccctgcattatctgtttcttctggggtcagttgttttctggtccattttggtcttactcttttattcctacaacccctgccccatccccatcctaactgtaataatccttgataatcattgcatatttatgctttttatgtgtgtgcagacaactgtttttatgcttatagatgccttcctctgtgtattttttttcttcagttaaaattttttttttttgcagtcacagtcttgctctgttgcccaggctggagtgaagtggtgccaacctagctcactgcaggctcaaactcataagcttaagccgtcctcccatttcagcctcccaagtagctagtactacaggtgcacactacatgctggctaatttttagatttcttttttgtagagacagggtctcgcaatgttgccggggctagtcttgagctccaggctcaaacgatcctctcgccttggacttccaaattgctgggattggaggcatgagccatcgcacctagcctatgtatgttttaaatagagtctatttcctctactctgtcattctagtcctatctacttttgatcttcctggaattactgtaaatttctgatttgctgatagcaccttttcttatttgtcggagccgccatgaattcgtttatataaacttttaattttactccttttagctactgttgttacctgttttacttttatatctattttaagccctaccatacaccgttattattcatgctttaaacaattgtcagttgtcttttttttttttagacggagtctcgctctgtcgcccaggctggagtgcagtaaacatgacctccgttgcaacctctgccttcggggttcaagcaattctcctgcctcagcctcccgtgtagctgggattacaggcgtgtaccactatgcccggctaatttttatatttttagtacagacagggtttcaccatgttggccaggttggtctcgaactcctgacctcaggtgattcacccgcctcggcctcccaaatgctgggattacaggcgtgggccaccacgcctggctgtcagttgccttttaatacatttaataaatggaagaagaataatattataattaatcacatatttactatttttgagctcttcattcctttctgtaaacctgagtttacatgtaatatttcctttaatccacatgattttctttatcagttcttgagtgtgagtttgttggtgatgtactctctcagcatccatttatctgaaaacatatttgttttgccttgaattttgaaaattcttattttttataatacaacagatccagtagtatgagaattatttttcaggattgtagaattctgggttgacagctttccccctctccctaccagtactttgtcttctggcctccattacttctgaagcgatgtcagttctatttcttgtcttggttctcctgtatgtatgtgactgcttttaagattatctttttgtctttggtttttagcagtttggctataatgtgacttaagtatggatttgtatagattggattcagatgaactttttggatcggtggtttgatttttttaaacaaacttggaaaacatttagccagtattttttcaagtatttcctctgttccacttatatgtatcagactttgttactcttgttgttcagtggtgtgatcacggctttctgcagcctcaaactcctgagcgcaagtaatcctcctacctcagcctcccaagtagctgggactacgggcacagagcaccatgcccagcaaattaaaaaaaaatttttttgtagagatggggtcttgctatgttgccagggctagtcttgaactcctggactcaagcaatcctcctgccttggcctcccaaaatgttgggattaaaggcatgagccatgactcctggcctagatttcttgatattgtagagtttacatatggcttctttatcttcatgcattatattaattttttactgtaaattctattacatatgtatcatagtaaacaaagtctttaaaataaattctaatatttgggtctgctttgggtccatttctattatatatattcttcttttcatgtttaataagtttcagctgactattgtacattgtgggtgatacagtgtagaaactccggatgatgtggatttcaatctttctctgaagtaatgagttttgttctagcaggcagttaaatttactagcagaccaacttgatcctgcggaggcttggttttaggctttgttgggacaggtctatttcagttttgccattacttctggtaagtggctcttattcttcaagtgtggcttttctggcgtttcagtggaaagcctgagatatttaccagttccctctaacactaaatcctgactctccaggaccagatagctgttgaaatctcttcccagttctttcagatttctagctattgcctgtccctgggcttcgattttcatcctatggatgggaattcaggagtcaggccccactgactcccattttcctgagatttctgccctcaatttttggcttttctagcagctccaaacttcattctctgatactttcacccagtaagactgcagctttttacaagagctctgtcccctcctctggcccctgcctgtacacaacagactgtgtatgtagttgtctcaggatggaagaagagtaagtatgggcctcattcagtgtattccccttctttcaagggtcatatccccccgatttgtatctgcttttgtttctttgacaatgccttcaaatggtgtttttataaatatatatttttaaaaagtttataattgtcgtcatcaggaacattagtgtagtataaactactctctcattatcaaaaatctgtatgttaaaaattacttaaaattgttgttatttatcatttccttggtgtttggggcagaagggaatgcacatgatttttctgaacttctcattaagggaggcaacccagccttggtctggagatcccgaaattataccgtatgtataataaaataattattttgttatttttatgagcatagcattaataaattaaatatttagtaagatttgtatctcaggatttttctacctgctaagaatagatcgtttgacaaggcagatgaggttctttgttgaattataaggtattgaagcctataatttagtagtggaaagagcacatagcaagagttgtatgatgaggttggagaggtaagcagcaaacagataatggaattttagtctaaacattcgtaaaatatgagggtggctcctgtgggagattaggttattgggaggcaaagtagacttagggaaaatagttaggaggacattgcaatagttcaggagagaaataatagctgtttagtgtatgatggtagttgtggaaaaaaaagccaatggatggatttgaaatatagtttggaagtaaaactatcagtacatattgatggactggatataggggtgaaaaaagagaagaataaaggttgaccaaattctttattatctcaaagtatgaaagcttgttaagacctcttttctgtttgtattttctttcttgctcaataagaaaacaacccaaagcactttttttctaataacttatatcttcttcttttgtgataaaaaaaaataggagtggtctttagagtacaatacaaaattcttttacatttcacctcaccatatttaggtttaccaaagtagtataggaataattgtaggaaaaacatagtatatctacttggactataaaattttggtatactaaagaaagtaaatcaaaatggttatatcttgcaatagaatgcaaaatcacatggatattaaaggtaaacatttaaatgtattttatattcttggcttcttcttcagaccactccattgccttttgggacatttctgtggaaaagttgagaagcactgacctatctgaaccttccaatccagccaaacttgtctctactttgttccaggaacatgctgtgtacattcctctttccatgttttgcatgcttttctccctgccaataatgccctgtttttcattacttgtcaaaattctattttccttttaaggtccagcctatgttttaattgttgtgtgaaacttctaaaacctttctttgttttaaataattatgatcattttcttcttgtcattttgtagcacttaatttttaaaatttattttgtacttagatgatgtgtaatttactataaatcatagatttttaagaattgggaggaacagcggaaatttaattaagtaattttattatacaagtgaggaagctgagattcatttgtcatgtaagtagtttgcaataagaaaggatgaaacttatttttaggtctcttggctcccaggttagtaatttttctaatctactgcattacttcttcatgtatatttattgatctgaaaagttgtgtctcttagaattatgtagtatatgagtaaagtttgaaaatatgaacttttaaaatgtgatatttgaggtactggtttttgagtgtatgtgtacagttgattaaaatttattataacttttatttactctttctttttttttttttttttttcgtagagacaggttctcactatgttgcccaggctggacttgaactcctgagctaaagtgatcctctcaccttggcttcccagagtgcagggattacaggtgtgagccactgtacccagcctcttatttactctttattcaacagatttgttaatcaacacatgttgaccagacttaattacagcttttatatactcttcatttattcaacaactttcatgtgtcagagagtatcctaggcactgagtgcagtagtaaataatacattaaggttcttaccttcaagaaactttcattctagtggtacaagacaatgagcaaaatcataatctaatctatggtgggaaaatatcagaacagctgtggccacttgagtggttggagcagggactgatggagaaggagcatggaagaactttctgggatgctgataatttcttagggctttgggttacataggtatatgcagtgtccaaacttattgactggtacacttaagatttgtgcatttgattgtatttaggagggaaaatcctgtaaaactagaatagatgtaacttatatgagagttataaatgacaatatgttaaacacccatgaaactaccacccaccccaggaactagaatgttgccagcaatttgcacctacatatgtgtttctccctagctattctcctgtctatcttgcagaagtaaccattgtgtattgtattttgggattaacatttccttgattttttattttttttttgcgggggcggggggagatttgtttaacacatgtatatgcctaaacaatgtactattcagttttgcttgtttttgaaatttagaaaaacggtattttacagcttacagttttctataatttactgcttttgcaacattgtatttttaagatttatccatgttgcataaagctatagttcatttattttaacaactgaggaacagattctgtagtataaatgcacaaaagtatttacctattttcctgatagtttgggttgtttgcagtttttgccattggaagctgaggcgcaatgaatattcttgtaatgtgtctcttggtgtaaatatgcatgaagtttgtaactagacgtagaattgtagcagttctcagaacgtggtctctagaggatgcctgggtatcctaaaaacctattcaagggtttaatgaaattaaaatgattttcataataatgccaagatgttaaatgtctttttcattgagttgacatatgcacaaatggtacagaagtaatagtgagttaaacggctggcaccttagcacaaatcaaagcagtaatgctggttgtagttgtgatcattgtattctttttctttttcttttcttttttttttttttgagacaaggtctcactttgttactcaggttggagtgcagtggcatgagcacaatcactgctcactgcggcctcggtctcctgggctcaagtgatcctattgttttctttctcgtcatgtacttccaggaaaagaaaaaagccaattcgagtcacttattcttttgattctttttcgtagcaaagcatcaatgcattttctaaatgattgaattcatttaaattcgggaaacatttactgagtgcctatggaattctgggatatgagtgtatgtttaaggcagtgtgatttccagttaccatcctttctgttctaaacacgattgtgtcatattaaaatataaaaagagtaaaaaatatcctgaataaaaatagatcaagctgtacatatatatagattataagtgcaaaatactgagtgtggttaaagcctatgctatgcttgctgggtttcctgtacagaagtaggcattggagacagttttgctcttgtggtacaacatggatgactagaggcaggtccaggatgttacttttactgccagccgtcgcttccctccaaatagactattggaaggggaacctcccgccaaacgctgcctactgctatagtgttggataagttgcaagcttaggaagatgagatgacatgatttaggaacttcaggatgaagtgaagtatctcctgccttgtgactgactggatctgcatcgtatcagatacctcctcaaggcaggaattttaacctgctgttataagacctggttctatatatggatagcccaggtaggctaagttgtggcagccacagattgttagatgaggagggacaccacagactgtgtatgtgtgtgtgttgagggcaaggtgaggtgaggaatggtgcaatgagcctgcaaaccaaattgcaaaatatatgaagaaatgtagtgctaagaaaaatagtcaacaaaattaaaaattgaaaaatgaattttttcctgataaaatttaaaaatgtaagtaaacctctaattgaagtgtaacacacaaacaggaaagtatgctactcataaatgcacagcttaacaaattttcataaagtgaacacacctttgttaaccactacttagatcaagaaatagagtatcacctgaattactggcaggaggcaccccagaggtctccctgtacctcctgccagttattctccatgccctcccactatcccaaccctgccaagctaaccattatcctaactttttttcaccatgagaaagaaatggaaggatatggaagtgagcttgagaggcctccatggtcagtgaacagttctgctaaaataatttagagggaataacaaagaagtagcatttgacggcatagtagctgagaatttcctagaatagaaaaaagacatgaatctttagattaaaagtatgtagtcatttttgatcaagataaagaagaatctacatcaaaacctttccaaaaatattgcagaacattgctgctaatgcaaacaagttttaaactacttgagggaaagccatgacatgtaggagtgatagcagacttcatatttatgttaatagataccacaaaacaatgcagtaatatctttaaagttctggggaaagaaaattataaataggattttgagagtgagggcaacatatttttttcaaagactacaacttaaaaacccacagagccccactgaaaggtctactaaaagatacatttcagcaggaaaaagtgagtcctgaaggaagacccaaaacaatgatgagcacaaaacaatccaaagtcagtggtgggcacaaactgataaaattctagcaaatttactccttaatgctaagaacttcgtttaaattaactttctatcttttcagaaaaccaactcttagatttgttaatcttttccatcatttttatagtttctatgtcatttatttctgctgtgaacttcattttttccttccttctgttagctttgggctttgttcttctttttctagttccttgaggtgtaatgtaatgttgtttgacatctttcttcctttttgatgtaggtatttattgctataaacttccctcttataactgcttttgctgcatttaatactgactataataagatacgatgtaatagatttcaaggaattatgtatttttgaataaattaattctttaaagttgcatatccagttgcagatgaacttcaaaaatcttgcagttttatatctgttacagtaattgccaggttttgttgttgttgttttgatacattagaagttctagaattgttatatcctcttgatgaattaatccctttatcattctagaattaccttgtctctttactgtttgtgacttaaagtctgttgtatctgatatacctttgcatggaatatctttttctatccctttactttcagtctatgtgtatctttaaaggtgagatgaggttttgtaagtggcatgtagttgggtcatgttttttagtccatttagccattctctatcttttaagtggaaagtttaatctatttacattcaagtttattcttgatatgtgaaggcttattcctgtcattttattaattgatttctggttgttctgtaggtcctttgttcttttctttctctcatattgtttagcattgtggtttgttggttttctatagtgataacatttgaatcctttcttgtctgtgtgtgtttgctttaccagtgggtttgatactttcgtcatctgtttttcataatggtagtaattgtcctttttgtttgtttgtttgtttcttttttgagacagggttttgctcttgttctgtcctccaggctggagtgcagtggtgtgatcatggctcactgcagcctcgacctccatggtctcaggtgatccttctgcctcagcctctcaggtagctgggactacagaaacctgccaccatgcctggctaattcttttgtatttttcgtagacatggggttttgccatgttgtccaggctgctcttgaactcctgggctcaagcagtctgcctgcctcagccacccaaagtgctaggattacaggcttgagccactgtgcctggcctgacattgttctttgacttccatatgtagaactccctcaagcatttcttgtaggtctggtctagtagtgttgaattcctcagcttttgcttgcctcagaaaaactatttttcctttgcttaatgaaggataattttgctgggtatagtatccttgacttgcaggtttttttctttcagcacttttcatatatcgttccattctcttcctggcctgtaatgattctgctgagaaatctgctgttagtctgatggagcttcccttagaagtgactagactcttttttcttgctgtttttagaattctctctttgtctttgacaagctgttgtctctgacaacagttctctctttgtctttgacaaactgttgacagtttgactctaatgtgttgtggagaacctgttggaattttgtctttttggggatctctgagcttctgtatctgaatgtctaaatctcttgatatacttgggtagttttcagctattatttcattaaccaggttttctattccttttgtattttcattgtcttctagaatactgaaaattctaatattagtttgctttatggtatcccatatgtcatgcaggctttgttcattcttttttctttatttttgtctaatggggttatttcagaagacctgtcttcaagttcagaaattctttcttcgtagatgctctagaatgtattttttatttcattaaatgaattcttcagtttcagggtttcttgttttctttttaaatgatatctctctctttggtaaatttctcattgatatcctgagttgtttttctggtttctttgtattgtttatctgtatgcgtttgtatctccctgagcttctttaatatcattatttttaattctttttctggcatttcatgaatttcttttgcattggaatcttttggtagaaaattattttgatcctttggagatgtcatatttccctatgttcccatgtttcttgtgaccttacttctttgatatccacacatctggtgtaatcatcacttccatttttttgaatttgctttcatagggtaggactttttcctgaagatttgactggggtgtttgttggccagggcactttgggtttgaatctgggtgcatgcagtagtgtagtctctgtaagattttttttcctttgtaaacagcatcagtggtgtctgtgatttcctcagtggcatagtgtgtggttgtggaggctgtggtgaacttttgctggggatggtgacaccagctggactgatcctcagtcctcagttgtggcagcagttggacaaccatgcctgtacattagccccagggtggcttacattagtaatggtgttagtgggtccaggcagtccaatttttgggtctccaggtgacttgtttgggtaccaggagtggcagtgatgggctgggcagctgagtgggtccacaggcccctgggcagtgagcatggcatgggttatgtcagtagcagtggtaggagaacctctggctgtccagttgtctgtgcttatgtcggcagtgacggcgattggctgggtaggcaagtcctaaaacctgcaggtggcaagtgtgagtgggaaccagctgtggtggtagtggcaggttgggtgggccacatcctcagacccccaggtggaatgctcagttgacactggacgtggacaaactggtgcgatcccaaggcccccagataacatgcttggatacgtgggagtggggtgctgagctgggcagggtgagagtatcctcaggccctccagtggtgttagcaggtgctgtttgtggtgggcaggagcaggatgatttccaatttcctggtggaatgttcaggtgggggcagcagtggctgtgctgtgccctgatgctggggagggtgcagttgctgtcagtgggagcagttgtagggagttggctaaggagtgtgcactgcagctgcaggtggaggctgtagatgtgatgaagctgtactcagggtgcatgcaaatttgcattttgacacctagcggcagcagcctgcaatggtggcagctgtaggtggtagagcttgtcctcagggcacataccaatatatggcagcccttctgctgggagcagtggggttattgccaatggcttgtgctttggtcccagaggcggcagccagcaatggaggtgactgtcggtggaggatgtcagtggggctctaggggtgtggatatgcaggggctgttgggctccagggtaggaggcattctggtgtgggttgggctttaaaaatggcaccgtgctgtagctgcttaggactcaggggtgtgttggaccagcataagctccctctctaaagcaatgtcattgtgcagtctccaggcagctccctatgttactcccagggcccatgaaagttgacgggctctcttgtgtctgggattgcaggagtttgcagtgaaaatgtgggccactgggagtctctcacttactctttccccacattgtgcaggctctctaggcttctggctgatcctggctgagcaggctgccccacttccctctccttccttgcattaggtgttttctatcacttctctgttgaatttccgtgttctctcttagatgacctattcaaagtgtgattatctactcgctattttggttcttctttgtggagcaggtgagtaccagataactctagtcaaccttctggacccctcttcccccaatttgagatctcttcttctgttgtctgtaactgagtttaatgcttgtttgttcatgttaggattttatatcatcgtcctcaattaggttgttaactggaattttataatctttgtccacaggaagtttaaaatgtatgatttcttgcattgtgctttgtatgtagtaatacacgatatttatccagttaatggatttgacagccattgctgtcaaggagcagtccttctttgtgtatgaagggtgccttatcaatattatttccatttgtaactttatttatttatgtattcatttttgagacagggtcttgctgtgtcacccagactggagtgcggtggagtgcggaggtttgctgcagcctcatcctcccaggttcaagcaattcttccgctccactcccagagtagctaggactacaagtgcgtgctgccacgcccagctaatttttttcttttgtatgtttttgtagagatgaggtttcaccatgttgctgaggcttgtctccaacttctgggctcaagctatctgcccgcctcggccccgcaaagtgctaggattacaggtgtgagacactgcgcccagcccatttgtaactttattgttttctcttacaggcaaatgttctgaaaaagactctgcatgggaatggcctgccttacgatgacagaaatggagggaacatccacctcttctatatatcagaatggtgatatttctggaaatgccaattctatgaagcaaatagatccagttcttcaggtgtatctttaccattcccttgggaaatctgaggcagattatctgacctttccatctggggagtatgttgcagaagaaatctgtattgctgcttctaaagcttgtggtaagtattaaaaaacagcattttcctttttatgcatggattgttttaattatgctatgctaatactaggtacatgcataatatatatttttatttttttaatgcttgtatggctggcgtgtgtgttttcacatgcatagaaaatgaaagtgttactggagtacaatttatggtgaatctgccttgggctaggtatcaaaacaaattgatgcccataaatgtttgctgactattctttataattacatataaggtggttaaaaaatcctgtcatgggctatctcatgacataaggtaatattaaagctagatcctgagagcaacatgaaagcaaaaaattaatgttttgaaatatgtatttgatttaaaatcttgattaaatggctgacaaaccatcattttcttctagttagcttctgaagacctctgccaatctttcctcatatatatttcttatgtctttggtgtatcttgaaatcatttttactcttgagacctgattatattatctatggaccaaaactgtgaaccagagaactctttctatagagctaacacattttactagaccactgaggttactatagagcctactatcatggtatctcatttttaaatgttcttttaatagaaagactagttgacactattttgaagaatagtcgtatgattttatttgtagaggcaaattaaatgtctaatatagtatttataagaatgtatgattacatcaatttattctcttatttaagatcagtataggtcagaataaccattaactgtaagttggaggaagctaggtacatttcaagttccttctagctattttgaaaaatacaatacattgttgttaactatagtcaccctactcttctatcaaacatttgaacttgttccttctgtctgtatttttgtgcccattaaccaacatctcttcatttccctcttcccacccatataaccttgccagtctctgctaccaatccactctaccttcatgtgatcaactttttagctcccacatatgaatgagaacttgttatatttgtctttcagttcctggcttatttcactcgacataatgaccttcagttccatccatgttgctgtgaatgacatgattacattcttttttacgatgccactgggccccaggggagtacgcattctgttgtgagctgggcttcaaaatatcaccttgctgtagctgcttaggactcggggggagcgtgggacccagtgtgaacttcctcactggaataggaaatgcttttgtgctgtctctgggcagccctctatgtgaattttttgtcctgcaaggggctagggtctctcctgtgactaaaattccaggggttcacagtaggaatgtggaccattgggcatctctaacttaacctttccctgtgtggagtctctcctagcttcttgccaatcccggctgggcaggctgtcttgtttcgtctccttccttgcttttctgttgaataccagtgttcctcttggataatctactcaaagtgtgattatatactcatggttttagtttttagtggggaagtggatatgagagacctctggtcagttatcttgactatattgtaaagtctgtattttttgttgtgtgtagtctctgaaatctctgatcctttagcttatagtaagattttagcttgtaagatttttttagcttttaagattttttagcttgtaagatattttttagctagtaagattttagcttgtaagatttttagcttgggccgggcacggtggcttacacctgtaatcccagcactttgggaggctgaggcaggcagatcacaagatcaggagatcgagatcatcctggctaatatggtgaaacctcatctctgctaaaaatacaaaaaattagccaggtgtggtggtgggcacctgtagtcccagctacttgggaggctgaggtgggagaatggcatgaacccaggaggcggagcttgcagtgagccgagattgcgccactgcactccagcctgggcgacagagcgagactccatctcaaaaaaaaatttttttttggcttgtaagattcatttttagcatgtaagattttgctttagcttgtaagatttttttttgacagattttattgaattcctagggccaaaagaaaataatagaaaagaacaaaaaactctttcagtctttgcagattggctctgtgttggggctctcattcagtgtttacccagtccatttacaactctgccttagccttcccttcctgcttgtgctgactctaaagaacagcttgaggtgaaagcttagggtcttttcttctaagttctgttccttgggcatgcatatggcttttctactctccaatacatagaaatgcttttcagtgctgtcatttcccaaataaactctcctctgtcatctctgttttggttttcagtgtgtttattgtttgcctcaactttagacctctgccccagatagcaacagcttgttcatttgcaatgttttcaatgaatatcttctgtgaagctgcttttctgccctgagaaagtcctgaattaagtggaacataggtgtgctctttgcatcatttcttcagtcagtccccagtcagggcaaaagagagaaaaacagttttttgagattaaggttggctctgttcactccagagccagggaccagagtttcacactgggagcaccaattgccatcttcaagactttgcttaactagggggagtggagccggggctggtgggcaggacatgggcgtagtgggtggttaagggaaagtaaaaatgctgcacaactttcctgccatttttaagtggctgttttcttgattcagcatttatctgattgctgcatatctttgcctattttctgtagtttatatgaagttcattctgacagtttttactcattttttttttcctgtttctgggagaaggataggtccttggaactacctactccaccattttcactgatgttactcttttacttttctaatcatggaagtaaagtttaagatttttctatctatattggtgagattacccttggtatcgtagtcaaactaaattcacaaaatgtgtcaatttctctgttcgctcttggtctattctctgtgatagtatacttaagatggaattgtctttcatgtttggttgaactcaaatataaatcttgtctgggcctgatggtggttttttctttcttcattgttattttgttattcttcttccttcccttcttctgtctctttcttgctccttctttcttttcttcttcttttgtttaagtggatagagtttgtttcctttttttttttttgagactgagtcttgctctgttgcccaggctggagtgcagcagcatgattatggcacactgccacctccgccttccaagttcaagtgattcatttccctcagcctcctgactagctggactacaggcacccaccaccacacccagctaatttttgtatttttggtagagacggggtttgccatgttggccaagcttatctcaaactcctgacttcaggtgatccacctgcctcggcctctcaaagtgtgtgagccactgcacccagccagaatctatttctttaatggttatagttctgttgaagttttaaattaatgaatctttttaaagttacattttcacaaaaattgtccatctgtctatattttcaagtttattggcataatgttgttctagcactctttgtcttcataacttataattatgctttttaaaagttcttagtgtttatctgtgcctctttttttcttattatccttgacaaagatctattttgcaaagaatcatcttttattttgttacttctccctattggatttttatcatgtccatctctaacctttctttgggattactctattgtcttctactatattgagttagatacttagatcatttgctcttattttctaatataagcagataaagctacaatttttcctcttgagtttcaccttagttgtattccacaatttttagtacatgatattggtaatcattattcattataaatgcctcccaatgtatttttcctttgacttctgagttatttggaagttatttgtaaataaaagaatgaatgcaagtatactgtttaaaagttgctgctaaataatgttattataaataacttaccgaaattattacacatctgtaagtagacggtcgtgttaataatttaaattaagaatttaagtctttcttgtcagtttgtcatttgtgccgtttctatctacagtggaaaatagtgaaaacataactagaataaaatacttttgtgttctgtgagccttatgttttaaatatataggattaaaaaaattttacatattcatttctgatttaattgaagtgtggttagagaacatggtatgaatggttattctgtggaacttctaaagacttgttttgagttcacgtgattgttgtgtttgtgcttgtgtgtgtacgtgtatgcgtatgtgtgaatgttctatatatgcttgaaaatagcttgtattatttacttgtgtggtttaggtattctcttggttttttagttcagtggctttcaaccatttgttgatgtaccttctaaaatatcttttaagaaattacatatgcactcacattttaagttgatatttaaaatttttcattgtaaattaaaatagcccaaaggacataattattaatgtattgtgtaaaacttgacacattgttcttttaagagtattcatgacttctaaatatttttgtgatttgatacctattaattaaaacaactccttctgtgcaaccacatgcaagcatggatttttattatacctccagttcagggaaacttgaaaatttgaaccaacctttctatagaggacaactgaagaaaccagatgaaatgttttaaaaatatctgcttgaaagagtctcagcagttatattttaaaatactgacacacctcggagatattgtgggtttggttccagactatcgcagtgaagcaaatattgcaataaagcaaatcacatgaagttttaggtttcccagtgcatataaaagttatgtttaaattattctgtagtctgttaagtatgcaataatattatgtccaaaaaagtacataccttaatttaaaaatactttattgtcaaaaagcactcataatcatctgagccttcagtgagtcataatctttttgttagtggagagtcttgccttgatgttgatggctactgactgaccagggtggtggctgctgaaggttgggtggctatggcaatatcttaaaataagacaatgaaggttgctgcatcagtggactcttcctttcgtgaaagatgtctctgtagtatgcaatgctatttgatagcattttacccgcagtagaacttctttgaaaataggaagttgattcactcaaaccctgccactgctttgattaagttgatgtagtattataaatcctttgttgtcatttcaacaatattcacagcatcttcaccaggaatagattccatctcaagaaaccactttctttgctcatccataaaaagcaattccttatatgtccaagttttatcgtgagattacagcaattcagtcacgtcttcaagctccacttctaattttagttctcttgttacttctaccacatctgcagtgacttccttcactgaagattaaatccctcaaagatacccatgagagccagaatcagcttcttccaaactcctgttaatgttgacattttgacctcctctcatgaactacaaatgtttttcatgacgtctagaatggtgaactctttccataagtttttttatttactttgcttagatctgtgagaggaaacactgtgacagccataaccttactaaatgtgtttcccaaataataagatttgaaagtcaaattgctccttatccatgggctgcagaatggatgttgtgttagcaggcatgaaaacaacatgaaattcaatgtacatcttcatcagagctcttgggtgaccaggtgcattgtcaatgagtaataatacttggacaggaatctttttttctgagctttaggtctcaacggtggcttaaaatattcagtaaaccacgctatatacagatgtgctatcttctaggctttgttgtcccatttatagagcacaggcagggtaattgagcatagttcttaatggccatagattttcagaatggtcaataagcattggcttcaactaaaagtcacttgttgcattagctcctcagaagagagtcattcagttctttgaaactttgaaggcaagcactgacttctttctagctatgaaactactcctagatggtatcttcttccaatagaaggctgttttgtctacactgaaaatctattgtttatcagtgatctttgttagatctttggataacttgctgcatcctctccatcaacacttgctgcttcaccttgcacttttatgttagggacatggtttcttttcttaaacctcatgaaccagcctctactagcttcttgcttttcttctgcagcttcctcacctctctcagccttcacaggtttgaagacaattagggccttgctctggtttagggtttggcttgagggaatattgtggctggtttgatcttctatctagaccactcaaacttttgtcacatcatcaataaggctgttttgctctcttatcatttatgtatttactgcagtcgcatttttaatttcattcaaaaactttttctttgcattcagaacttgattgactggtgcaggaggcctggcttttagcctctcttggcttttaataataccttcctcacttagtttaattatttctagcttttgatttaaagtgagagatatgaaactctttaatatatgaaactcttcctttcccttgaatgcctagaggccattgtaggattattaattggcctaatttccatattgttgtgtctcagggaatagagaggcctaaggagagggagagacacaggaatggctgttgctggagcggtcagaacacacacagcatttgttgcttatgtttgtcatcttatatgggcacggttcatagcggccccaaatgattacaattgtaatgtcaaagatcactgatcacagatcatcataactgatataataataaaaaagtttgaagtattgcaagaattaccaaaatgtgacatagggacacaaagtgagcacgtgctgttggaaaaatggtgctgacagacttactagattcacacttgctctaaatccttattttgtaaagaaaaaaaccccacaatatctgcaaagtacaataatgcagggtgcactaaaatgaagtatgtttgtataaaaaaagattgtgattaataattcagttgtaggggttggtatatcaaaagatttcgactgctattacattttgttccgattttaagagttgttactttagcttcatttcaaattataggtgctatgtaaaaatattctgttgtgtacctttaataattcctttctctgcttcttttctaggtatcacacctgtgtatcataatatgtttgctttaatgagtgaaacagaaaggatctggtatccacccaaccatgtcttccatatagatgagtcaaccaggcataatgtactctacagaataaggtactttcttcagtaaagtaactcacttaatgctaaaaggcaaaatgggagaaattatcaaatattttttaattgcaaggtacttaataccagatacctgaaccaattagttagcactcatttaagatttcatttaagattctattctgtttctccatcagagaaactgtttatacatgttgtgtaagtagaatactctgagaataaagctgttttggtgggatgccacttaactccttatgattataattaaataagtaaacaaaatcacagtggcctttattaacaaaatcctaaatgtttgggatattgctggtttgtgcagcgttttgtgcaatagaatgcaatttcacatcttatctttataaagaactttttaaaaagttgacgtgaagaaaagagacttttcccagtgtgtatttgcagcctcaaattgtaagttaatttatataatttatggtaatgtgtaatgcctatttagagaaatctagaagtatttttttgctcgaaaggatgaaacaaagatacgtttgatttgtgtctcacaaatacctgtgatttttctaagcatttatatacatatatatataattcatcataacttcatgaggtgttaagatttccacattaaagataaagaatttggagcactgagaagtaatattactcaaatttattcatggtcacacaggtaggaattgggagtcaggttcaaatccaagcctggtttgcttcataagcttgcctcttaatcacctcatgtgtacttcattaaagagataatgtatatataatatttattattgtgcctatcacttggtgctctctcaataaattttagtattgttttgcttctttctcttcccctattctatataaaaatatgcagttggatgtgtttgcatttactgatgtctaatgtataatttgcactgagttcaaaaaaatattttttatataattattgaaaagacaattggtgaaaaaaataaatgttcaaagaaataatagatgtacaaaaatcaacagcattcttatatgcaagcaaccagttatataatagataaagaagatcctatgcagtgtagctacaaaaacccttaactaaccaggaatggtcttaataagaaaaaacagaagacagtataggaaaattagaaagttatttgaagaatatgaagaattaggacataacattggaatggggagatggaatattacaaagatcaatttctcttatgctatatccttagctctaagccaatcaaaatcctaacaaaggcattttacggaatttgacacattactatgtaaattgagaattattaaataagatagccatgagaaagaagacttacctggcaattgtaaaatattttgtcccaggagatattttcacattatatgaaactacaaaatggtatctattattaaagccacataattaaattcagaatcataaactaaataatgagaatgatggggccagtatatcttgaaagtactccttcatacatatagaaacataataatatgaagaaatcttttcatattaacgtggaagggagagattagtcaacaaatggtggtagaatagttgattagctgtttgaataaaattttagcttcttactttataatgtatatcagataaattatagattgattaaagatcagattgatatgtaaatagaaatgtaaagaaaatcaaactataaaagtctgaattggaactgaattcaagtccttgggaaaataccatttaagttgcaaaacaatagaaaaaatcatatgggaatgactgcaattgtcaactataaaaattttcaaatgtctgaaggtttcctcttaaaatgaaaaggcaggagggtggagccaagatgactgaataggaacaggtccagtctacagctcccagcatgggcgatgcagaagacgggtgatttctgcatttccaactgaggtgtaccgggttcgtctcactggggagtgtaggaaagtgagtgtaggacagtgggtgcagcacactgagcatgagccgaagcagggcgaggcatcgccacacccgggaagcgcaaagggtcagggaattccctttcctagtcaaagaaaggggtgacagacggcacctggaaaatcgggtcactcccactctaatactgcgctattctaacggtattagcaaatggcacatatcccgcgcctggctcagagggtcctacgcccacggagcctcgctcattgctagcacagcagtctgagatcaaactgcaaggtggcagcgaggctgggggaggggcgcccgccattgccgagggttgagtaggtaaacaaagcagccaggaagctcaaactgggtggagcccaccacagctcaaggaggcctgccggcctctgtagactccacctctgggggcagggcatagccaaacaaaaggcagcagaatcctttgcagacttaaatgtccctgtctgacagctttgaagagtagtggttctcccagaatgcagctggagatctgagaacggacagactgcctcatcaagtgggtccctgaaccccgagtagcctaactgggaggcacccccaagtagggggagactgacacctcacatggccgggtactcctctgagacaaaacttccagaggaacagtcaggcagcaacatttgctgctcaccaatatccgctgttctgcagccactgctgctggtacccaggcaaacagggtctggagtggacctccagcaaactccaacagacctgcagcagagggtcctgactgtcagaaggaaaactaacaaacagaaatgacatccacaccaaaaccccatctgtatgtcaccatcatcaaagacaaaaggtagataaaaccacaaagatggggaaaaaacagagcagaaaaactggaaactctaaaaatgagagcacctctcctcctccaaaggaacgcagctccttaccagcaacggaacaaagccggatggagaatgactttgacaagttgagagaagaaggcttcagacgatcaaactactccaagctaaaggaggaagtttgaactcatggcaaagaagttaaaaaccttgaaaaaaaattagacaaatggctaactagaataaccaatgcagagaagtccttaaaggacctgatggagctgaaaaccaaggcacgagaactacgtgatgaatgcacaagcctcagtagccgattcaatcaataggaagaaagggtatcagagatggaagatgaaatgaatgaaatgaagtgagaagagaagtttagagaaaaaggaataaaaggaaacaaacaaagccttcaagaaatatgggactatgtgaaaagaccaaatctacgtctcattggtgtacctgatggggagaatggaaccaagttggaaaacactctgcaggatattatccaggagaacttccctaatctagcgaggcaggcaaacattcaaattcaggaaatagagagaacgccacaaagatactccttgagaagagcaactccaacacacataattgtcagattcaccaaagttgaaatgaaggaaaaaatgttaagggcagccagagagaaaggttgggtaacccacaaagggaagcccatcagactaacagcagatctcttggcagaaactctacaagccagaagagagtgggggccaatattcaacattcttaaagaaaagaattttcaacccagaatgtcatatccagccaaactaagcttcatatgtgaaggagaaataaaatcctttacagacaagcaaatgctgagagattttgtcaccaccaggcctgccctaaaagagctcctgaaggaagcactaaacatagaaaggaacaactggtaccagccactgcaaaaacacgccaaattgtaaagaccatcgaggctaggaagaaactgcatcaactaatgagcaaaataaccaggtaacgtcataaagaccggatcaaattcacccataacaatattaaccttaaacgtaaatgggctaaatgctccaattaaaagacacagactggtaaactggataaagagtcaagacccatcagtgtgctgtattcaggaaacccatctcacgtgcagagacacacataggctcaaaataaagggatggaggaacatctaccaagcaaacggaaaacaaaaaaaggcagggattgcaatcctagtctcggataaaacagactttaaaccaacaaagatcaaaagaaacaaagaaggccattacataatggtaaagggatcaactcaacaaaaagagctaactgtcctaaatatatatgcacccaatacaggagcacccagattcataaagcaagtccttagagacctacaaagagacttagacttccacacaataataatgggagactttaacaccccactgtcaacattagacagatcaacaagacagaaagttaacaaggatatccaggaattgaattcagctctggaccaagcagacctaatagacatctacagaactctccaccccaaatcaacagaatatatattttcagcaccacaccacacctattccaaaattgaccacatagttggaagtaaagcactcctcagcaagtgtaaaagaacagaaattataacaaactgtctctcagaccacagtgcaatcaaactagaactcaggattaagaaactcactcaaaaccactcaactacatggaaactgaacaacctgctcctgaatgactactgggtacataacgaaatgacggcagaaataaagatgttctttgaaaccaacgagaacaaagacacaacataccagaatctctgggacacattcaaagcagtgtgtagagggaaatttatagcactaaaggcccacaagagaaagcaggaaagatccaattgacaccctaacatcacaattaaaagaactagaaaaccaagagcaaacacattcaaaagctagcagaaggcaagaaataactgagatcagagcagaactgaaggacatagagagacaaaaaacccttcaaaaaaatcaatgaatgctggagctggtgttttgaaaagatcaacaaaattgatagactgctagcaagaataataagaaaagagagaagaatcaaatacatgcaataaaaaatgataaaggggatatcaacccgatcccacagaaatacaaactaccatcagagaatactataaacacctctacatgaataaactagaaaatctagaataaatggataaattcctggacacatacaccctcccaagactaaaccagaaagaagttgaatctctgcatagaccaataacaggctctgaaattgaggcaataattaatagtttaccaaccaaaaaaagtccaggaccagatggattcacagctgaattctaccagaggtgcaaagaggagctggtaccattccttctgaaactattccaatcaatagaataagagggaatcctccctaactcattttatgaggccagcatcatcctgataccaaagcctggcagagacacaaccaaaaaggagaattttataccaatatccttgatgaacattgatgcaaaaatcctcaacaaaatactggcaaaccgaatccagcagcacatcaaaaagcttatccaccatgatcaagtgggcttcatgcctgggatgcaaggctggttcaacatatgcaaatcaataaacgtaatccagcatataaacagaactaacggcaaaaaccatatgattatctcagaggcagaaaaggtctttggcaaaattcaacaacccttcatgctaaaaactctcaataaattaggtattgatgggacgtgtctcaaaataataagagctatctatgacataccgacagccaatatcatactgaatggacagaaactggaagcattccctttgaaaactggcacaagacagggatgccctctctcaccactcctattcaacatagtgttggaagttctggccagggcagtcaggctggagaaggaaataaaggttatttgattaggaaaagaggaagtcaaattgtccctgtttgcagatgacatgattgtatatctggaaaaccccatcgtctcagcccaaaatctccttaagctgataagcaacttcagcaaagtctcagcatacaaaatcaatgtgcaaaaatcacaagcgttcttacccaccaataacagacaaacagagagccaaatcatgagtgaactcccattcacaattgcttcaaagagaatacctaggaatccaacttacaagggatgtgaaggacctcttcaaggagaactacaaaccactgctcaatgaagtaaaagaggatacaaacaaatggaagaacattccatgctcatgggtaggaagaatcaatattgtgaaaatggccatactgcccaaagtcctttatggattcaatgccatccccatcaagctacagatgactttcttcacagaattggaaaaaactactttaaagttcatatggaaccaaaaaagagcccacattgccaagtcaatcctaagccaaaagaacaaagctggaggcatcacgctacctgacttcaaactatactacaaggctacagtaaccaaaacagcatggtactggtatcaaaacagagatatagaccaatggaaagaaataatgctacctatctacaaccatctgatctttgacaaacctgacaaaaacaagaaatggggaaaggattccctatttaataaatggtgctgggaaaactggctagccatgtgtagaaagctgaaactggatcccttccttacaccttatacaaaaattaattcaagatggattaaagacttaaatgttagacctaaaaccataaaaaccctagaagaaaacctaggcaataccattcaggacataagcatgggcaaggacttcatgtctaaaacaccaaaagcaatggcaacaaaagccagaattgacaaatgggatctcattaaaccaaagagcttctgcacagcaaaagaaactaccatcagagtgaacaggcaacctacagaatgggagaacatttttgtaatctactcatctgataaagggctaatatccagaatatacaatgaactctaacaaatttacaagaaaacaacaaccccatcaaaaagtgggcgaaggatacgaacagacacttcttgaaagaagacatttatgcagccaaaagacatgaaaaaatgctcatcaccactggccatcagagaaatgcaaatcaaaaccacaaagagataccatctcacaccagttagaatggcgatcattaaaaagtcaggaaacaacaggtgctggagaggatgtggagaaataggaacatttttacactgttggtgggactgtaaactagttcaaccattgtggaagtcagtgtggcgattcctcagggatctagaactagaaataccatttgacccagccatcccattactgggtatatacccaaaggattataaatcatgctgctataaagacacatgcacacgtatgtttattgcggcactattcacaataacaaagacttggaaccaagctagatgtccaacaatgatagactggattaagaaaatgtggcacatatacaccatggaatactgtgcagccatgaaaaatgatgagttcatgtcctttgtagggacatggatgaagctggaaaccatcattctcagcaaactatcgcaaggacaaaaaaccaaacactgcatgttctcactcttaggtgggaattgaacaatgagaacacatggacacaggaatggaacatcacataccggggcctgttctggggtggggggatggaggagggatagcattaggaaatatacctaatgttaaatgacgagttactgggtgcagcacaccaacatggcacatgtatacatatgtaactaacctgcatgttgtgcacatgtaccctaaaacttaaagtataatagaaaaaaatgaaaaggcaaattgtaaagatagtttcaacaaatcaaataaacataaggttagtattcttgtaagtatgaaatttaaaacagtgtatccatttaacaattacttaatgtacatgaatatatagcgtcactagttatgagaataatgaacgagattgcttgctttagcacatagttacaactattcattattcttataactagtgatgctgagaattttttgaaaaggccattaatgatttgttcttcttttgttaaatatttcttcatgtacattaaataattgtttaatggatacagtgtttttaatgccaacaaattagaggatcaagatgaaatggacaaattcctagaaagacacaagttataggaactgctaaaagaaagaacagaaagtttgaataggtctatgacaaataaagaaatcaaattagcaatttttataaaagcccaggcccaagtggcttcacttgtgaattctatcacacattaaaaaaattattactagttattcacaaaaaatagaaaaggaaggaggatttctgagctctttctgtgagttcagtattaccctgataacaaattcagacaaagatgtctagaagaaaagaaaactacagaccaatgttgtaggtagaaaatcaacaaaatacttgcaaaccgaatccagcaatacagcttgaatatgtcttatctgaaatgcttgggaccagaagtgttttggattttagatttttttttttttttttggattttagaatatttgcagagtatacgctggttgaacatacctaatataaaaatctaaagtctgaaatgctctgatgaatatttcttttgcacatcaggttagcgctctaaaggttttgaattttggagcatttcggatttcagattttcaggttaggaatgctcagtttgtttataaaaagatgaaatactatgaccaggtgggatttatcccaggaaatacaaggctagtgtaacttccaaaaatcaatcaatgtaatacaccacattaatagaataaatgaccaaaaccacatgatcatcccaagagacacagaaaaagtatttgataaaatccagcatcccatcattataaaaaaactcaacacaataggaatggcaaggaacttcctcaatttgttaaagggcatctgtaaaaaattcaaaagtaatgtcatacttattagtgaaagactgaatgccttttccctatgatcaggaatgagatgaggatagctacttttaccactttgatttaacactatactgtagattcagggtagggaaattaggcaagaaaaagaaataaaaggcatttatattggaaaataagaagtaaaattgtagtcatcccgctgtatccatgggtttcacatccatggattaaaccaactgcagattgaaaatacttggaaaaaaagttgtgcttacactgaacatgtacagactttttcttgtcattactccctaaagaatacggtataacaactatttacataacatttacattgtattaggtattataaatagtctagagattttaaagtatactgaaggatgtgcacaggttatatgcaaatactatgcctttgtatatcaggaacatgagtatttgcagattttggtatgtgtgggaggttctggaactagtactgcatagataccaaaggatgattgtgtattcacagattacatgatcttgcatattaaaaatcctaaggaattaataaaaaaactattagaactaataaatgagctcaggtcagttgcagaatagaagatcaatatataaaaatcagttgtatttctatacagagacaaagaacaatccaaaaatgaaattaaaaaaatttcattaacaatagcataacaaatttttaggaataaacttaaagaagtgtaaaatgtatacactgagaaatataaaacatcattgaaagaaattaaggaaacacctaaataaatggaaagatatctcatagaggacttcatatttttaagatggcaatactccttaattgatctgtatgttcaatgcaattcctactgaattcctaaatgtctttattgcagaaattgacaggttaatcataaatttatataaaaagcaaagggacttagcatagctaaaacaatcttgaaacaatacaaagtttgaagacttatacttcctaattacaaaatttattacaaaaggactgtaatcaagacaatgtgatactaaaggatgaatatacagattaatggaaaggaattgacagtctcaatataatttctcacattgatggtgattgatttttgatcagggtgccaagacaattcatgggcatagaatagtcttttaaactaacagtgcggggacaactggatatccacatgtaaactaatgaagtaagacaatctacttcacactatatacaaaaaaaaaaagcttaaagtggatcataggcctatatatgagagctaaacttattaaaactccaagaagaaacacagaagtctttgtgtacttagattaggcagtggtttcttagatatgacaccaaaagctcaagtgacaaaagaaaaatagttaagttaggctttatcaaagttaaaaacatctgtgtgtcaaagcacactatcaaaaatgcgaaaagaccacccacaaatgggttccacaaaatggaagcaaatgtttgggaatcatatatctgataattgtcttatctccagaatataaaagaattcttacagctcaacaagacaatgacaacttaatttaaaaagtaggcaagggacttggatagacatttttccaaataagatatacaaatggccaaaaagcatgtaaaaagatgcccaacaggtgggcccctgagcgggcgtccgggaccgtggtgtgccaggcgccttccgcccttaacatgcggtggctggcccaggcggtgcaggagctggagcggggcccgagtggggcgccagagccccagcgcgagcaggagaggggccggagcgcggatccgcgccgcgctgctgaagcctggccggccacccagacgctgccggcagcctggccatggcggagccaaggaaagaatctctatacaaacaaatatgtggctatcaaattggagctgatcaagttccggaccccgcagctgcacctgggtaccggttctacaagcagctcagcgccatagagggcgtccctcaggtctactacctactacagcctggaggacctgttcgaccttcacgcccaagacggtgctcctgatcgccatccggctgatcacgcgcatggattatgtgcacaccaagaacctcatttaccaggacgtgaagcccgagaacttcctggtggggcgcccggggaccaagcggcagcacgccatccacatcatcgacctcgggctggccaaggggtacactggtctcaggaccaagaagcacatcccgtgcagccagcacaagagcttgacaggtacggcgtgctacatgagcatcaacatgcacctgggcaaggagcagagccactgcaacaacctggaggtgctgggccacatgttcatgtacttcctgtgcagcagcctcccctggcaggggctcaaggctgacacgatcatgagcggtacagaagatcggggacacatagcgcgccacgcccatcgaagtgctctgcgagaacttcccagaggagatggctacgtacctgcactacgtgcggcgcctggactttgagaagcccgactgtgactacatgcggcgcctggactttgagaagctcgactacgactacctgcggaagctctccagctacctcttcgaccgaagcggcttcgtgttcgactctgagtacgaggggctcgggaagcccttggcgacccccatcagcagtgtccacaccgacctgccctcccagcctcagcttcgggacaaagatcagccgcacagcaaaaaccaggcgctgaactccaccaatggggagctgaacgcggacgaccccatggccggccactccagcgcccatcagggcgcctgcagagatggaggtgggcgatgaaacgaaatgctgctgtttcttccccctgaatcttctccgtgcggccccttggggagcgagcttgtgtgagggccttggggcccacccacagcggcccagggccagacgctggctggaagccaggacacagactgcagggtcttggccggcggccccatccccgggacgaggggtcacttccttcacgtaagactggccaaaatttcttttttttttttttttttttttttgagacggagtctcgctttgtcgcccaggccggactgcggactgcagtggcgcaatctcggctcactgcaagctccgcctcccgggttcccgccattctcctgcctcagcctcccaagtagctgggactacaggcgcccgccaccgcgcccggctaattttttgtatttttagtagagacggggtttcaccttgttagccaggatggtctcgatctcctgacctcatgatccacccgcctcggcctcccaaagtgctgggattacaggcgtgagccaccgcgcccggccaagactggccaaaatttctacacctgtgtctagtcctcccctccaagagcattaactatttaaaacaaggaataaaggaaaaaaaagaaaggccccctccacccccacccctccattactttgctgaagtgagtagtgggatcctggaggcccccagggctgaggcccagccagctgcccccgttagcgtcataaagtccagcttgtctccctcatccaaaggccgttttctcagtgggagggcaggcctggcctggaggggtgctgtggggccatcttgcccaggcccacctgggagggacacaggcattgctgccaggggtgaggctgtgccccaggcctccccaaaactaaaggggaacggaggggtggggccgcggctgaagccagccccgcaaccaaaatgctgcaccaaagctcggtcgccacaggcacggccaccgcagcctttcacagcctggccccggcgaggggcaggtgggccctgctaggagggtgcttctcgaggcacctgttccccgaggctgtgctccgaccctcagaagctgaggggggtgggccggctggcgtcgcgcggctcggcccctgggccctgctgtgtggaggcgcgcgggctcgtggcttcctgtctctgtgctccgccccctggcaagcagccgcagacaaaatgccttaaagcccccgacccagccccgcaggtgtatgtgcaggggggtctgcgggcggccctggactggctggcggactcccagcgggtcagcttgaggcagtgcccagggcggtggccgtgagtctggtttttgctttaccaagtgtacggaaatggcgtttacgtttctctgatgctcttttgaagccatacaacttaggggctttaaaaaaaaaaaggaaaaatgaaaccctccgaaaaaaagatgcccaacatcattggtcattagagaaatacaaatcaaaaccacgatgggataataataggtctacaaggatggcaaaaatcagaaagacaaacaataacaagtgttagagaatttggactaatttggatgcagtatattgctgttgggaatgtaaagtggtgctgctactttggaaaacagtttggccattccttaaaagggtaaacaaagagttaccatatgactcagcaattctacttctagatatatatgcaatagaaatgaaaacatatccacaaaaacttgtacatgactcttcatactagcgttattcacaatagaaaaataatagaaacaaacccaaatgtctgtcaggcgatgaatggatacagaaaaagtggtatattcatacaatgaaatattaatttggcaataaaaggaaatgaagtaatgatacatgctctaatgtggatgaaccttgaaaacattatgctgagtgaaagaaggcagacagaaaggccacatgttctaaaattagattgtgatatttgtacaatgctatgaataaactaaaaacattgaattttacactttaagtgggtggactttatggtatgtgaattatatctcaataaaggtgttactaaaagacaatatagagtgttctttgtttctctgaaggacaagtttttaacttccatttctccaaataagcaattatttgtttttataccaaattagcattttcagattccctactgatgttactggattaagctatgtttttaactttttgttaatttctacattttttgtttcctactattgcttctacattttgtgcactgaaggaggtagtatattgattttacacttacatttcttgtactttctgcctatattagtgttatccacatatccttttgtctcacatttatatttaatactgttagctgtgttttctaagtatgggataatacctttcagtatgctgtaggtgactatatatagatagtacgtttgtatttgaactatttggaagctgaccaaatgtttttattatcttgtagattttactttcctcgttggtattgcagtggcagcaacagagcctatcggcatggaatatctcgaggtgctgaagctcctcttcttgatgactttgtcatgtcttacctctttgctcaggtatgattatattatcttacttgtacatgagttaaatgataaatatcttgctgtttaataagtcacttaatcaggaaaaactttacatatgggaaaattgcagttctgtcttgcacagcaggtgcagagaagtaacaaaattgagtcttttagcactagtttttaatcccatggtttatggataatagaatctattttataaagtttttttggactgatccttttgaatttctttcttttttaggactttagatcattttaaggatttcgcaaagtatagactgaggtttacaacatgattcatgtagacatacgtggctaaaatattagtaacatttctttatggtttttaaaaaaatttttggacaatttcaggcttacacaatggacaatgaactgtagagaaagtaggttacataaaaaaatgagctctgatagtttgtttagctgtttataggaaggtgactggatgttgatacttagtctaagagctatattcaagttatttgttcactaatacagttatgtcaaatttttgtattgtgttggtatttcataatgctttcttctctattaccttgatttaaacagtaattgaaatattttgtcattaaataacttgtttttatgtgctgctagactagtaggaatagaaattaaaggaagaaaatatattagtgctcttgggtaaaaataggcacttggtatccccaaggtatcaggagttctaaatcagatttgctaatattgtaggaaacaagcccacagatcctcatggctcgcatttctgagaggaagcctagtaagcctagttcagtttatgaacaacaaaaggaaaaacatttctctattggggtatgagaccaacaaactttatttttattgtggtaagagatatataataaaaatgaccattttaaccattttaagtgtacagttcagttgtattaagtacaaatacattgctgtacaaccatcaccaccatccatctccagaacatttttcatcttcccaaatggaaacttcatacccattaaataataactctgtatttcccactcccaatggccttttgcaatcaccattctactttctgaatataaatctgccttttctatgtacctcatacaaatggagttatatagcatttgtccttttttgactggcttatttcacttagcataatgtctgtcaggttcatccatgttgtagcatgtgccagaatttctttcctttttaaggctgaataatattccattgcatatgtatactgcattttatttgttcattcatctgttgatggatacttgggttgctgctgtgaacatgggtaaacaaatatttccttgagtccctgttttcagttcttttcaatatatacccagaaatggaatcgctggatcatatggtaaatttataattttttttgaggaactgctacattgttttctgtagtggctgcactatttttcagtcctaccagcagtgcacaagtgttccaatttctcaacatcctcaacaatgctttgctttgtttgataatagccatctctatgggtttgaggtggtatcattgtgattttgatgcatacttctctaacaaccagtgatcatgagcatcttttcatatgcttgttggccatctgtttatcttctttgcagagatgttgcttgttggctatttgtttatcttctttgcagagatgtctactgaagtcctttgcccatttttaaatcaggttgtttgtttgttgttatattatagaaattattattctggatcttaactccttataagatacatgatttgtagatagtttttcccattctctaggttgccttttcattctgttgcttgtcttttgatggacaaaagttttaaatttggctgtattctaatttatctattttttgtttcctatgtttttggtgtcatatccaagaaatcattgccaaatccaatgttatgaacctttctttctgttttcttgtaagagttttatcattttagctcttacatttaggcattgggtccattttgagttaatttttgtctatcgtgaaggtaagggcccaacttcttttgcttgtgaatatccagttttcctagcaccatttgttgaaagactgtcttttctccattgaatggtcttggcacctttgttgaaaatcatttgaccaccaacctacttttttatacagctcctttatctgtatagccattatgaaaagagaggggaatggagagaggcttctaagaatagccttttgaaaacaggatattatgaggttacaactttctgttgcttttacgggtatattatttcacctgtgctgcagagctagtatattttgggggtaggctagttaagtcccatttataagccaagttttcccaaactattcattcagctactttagcctaatattaatactgcaatgtctagtatttttgatctagaaaaattttgggtgatttcagaatactcaattttatccttctaggaaggattgtcttatctagcatggcaaggtaattccaccatataattctaaattatgtctagatagtaccacaagcaattttctattttttaatgtttttacttctctaaatttgtgcccagaaaatatgatagtatttagattactctaagattgtactgttatcattttatattatatgcatgttgtagactatatatagcaaatgtgaccagtggcattaccagagtgtaagaatatcttgacatctttaaataaccaaaaaatagataagccactgaactgtctttaaagttcttaagacagtacctgtaggaagacagatttggaaaaggtaagcaaataaaaatcaaaagtaagatggcccttttaaattcagtttcctctgggaattaattgcctttatatcatcaaatatggctgctaagcaaataaactgctgacatgtgaacaacttttaattaattcatatctattcaacaacaattggatgtttacctcatgttcttggcatcatttctgattttgtgactgtgactgttttttatttccctggctaatgaagatgtaaatttcttaagttcaaattttgtcagctactcaaatgagaaaaggttttctttcttattttatttttttatagagattgaactcctgggctccagtgattgtcttgcttcagcctgtcagcctcctgagtagctaggtacaggtgtgtgccactatgcctggctaatttttttagttttggttttgtggagatggggtctcgctctattgtccaggctggtttcaaacacctggcttcaaatgatcctcctacctcagcctcccaaagtgctgggagtacgagtgtgagccaccacacctggcctgaaatttttcagtagttctaattaaatgaaatttctgagggtacatactataatatttaaggaatagtatttattatgttttggcatttgagactcttccatttgtaacttttctctagtgaatagtttattatgtttttagtattgccatcactcatttttcatatatttattgtcttctgatcatgacttccatagaatttccacatgagcagaatttgttatctaccagttcttttcttttctttctttttttttgagatggagtctcccactgttgcctgggctggagtgcaatggcgtgatctcggctcactgcaacctctgcctcccaggttcaagtgattctcctgactcagcctccctagtagctgggattacaggtgcctgccactacgcccggctaattttttgtatttttagtagagatggggtttcactatgttggccaggctggtctcgaactcctgaccttgtcatctgcctgccttggccttctaaagtgctgggattacaggtgtgagccactgcacccagcccatctactagttctatagggaaccaaggcaggctattaaaaagaatctaccaagtcattgatcatcttctacttaaacagtataacttacttgcctgttctcaaaagtgtggtgaaataagtgtttaaaattgagcaaaaatctgtctcctaccctgaattaattttgtattagcaacgtttaggcctttgttttgggtgatactgattatttgatggtgtggttcttaatagtttattttcttatatgaaaatatcttctatattttattaatagaaaagcaaatatacttttaaatatgtttcttttaataaaattagtttaaaaaggttccagtaaagctttaatttcatgagacaagttattacatcaagagaagagaaatacagatgtagagtatagagggcccttgtccggtttaaaaccttgattcgcattgttattttaggtaatatggctcttacctttttttctacaaagaaaattggtattatgtttagaatatttgtacttctgctttctttttctttctcccattacatgttcagtcagatttatctgtattcctaaatcctccaggtcaaaatcgtagaacctctgtgtttctctcttcttcattctttagacaatatatagttaataaagttatcagccttttttcagaatcttttagtatcttctgtttcctggatcagatccttattatttcgtatctgagccatacaccagcctcttaaagagcctccgtaaatacactttattttcttcaagcacttctatcattgctactactctgccaatggaagagacatgatgaaaacagatctccatagtttctaggatcaggtcattcaagggtacctgcagtcggaccccaacttacttttctaagttttaatccacattatttcttcacataaacttcaggccctaatcaaattagtttatgcatctgaacatatctggtgcttttgtgtgtgtgtcattccttctatttctttaccctgttttgtgtccatcatacatttctttatttttaaacacactgtgaagtttcaaatcttccatgaaaccctccttgattactccagctgaatataatcttaactttctccaagttcctgaaggagcttttgtgtggtgcttcctatatcatgtctggtgttataattatttgcttctgtttcgcttctaagctaaattttggtccccttgatgactgagaccacatcttatacagtcatgtgtcacttacttatggggatatattctgagaaatatgtcgttaggcaattttattgttctgtgaatatcatgtattgtacttatacaaacctatatgttatagcctagtatatgcctagtctgtatggtatagcctattattgctctaggctacaaacttatatagcatgttgctgtactgaatattgtaggcacttgtaacacaacggtaagtatttgtgtagttaaacatatctaaacataaaaaagatacagtaaaaatgcagtattacaatcttatggaaccatcgttatatatgtggtctgccattgaccaaaacattgttatggggcacatggctatttctttgtatccaacaccacttgtagtatgatacttccaacataattggagttcagtatatatttaactcagtaatatctactttaatttaggtaatttttatgtagaagatataatttgaagatatatttaatgaaataggttgatgttatatgtactctgtaattgggaacccagtgtaaatcagtttccatttgcaaatgaacttttattaaaattgtatcgcaaaatgaatgaaaattaaaggaggaatttatgccatttatttatttattaatcattttagagactgggtcttggtctgttacccagactagggtgcagtggtgtgatcatagctgaagagatcctcctacctcagccccccaagtagctgggactgcaggtatgtgccaccatgcctggataatttttaaattttttgtggagatgagatcttgccatgttgcccaggctggtctcaaactcctgggctcaagtgatcttcatgccttggcctcccaaagttctgggattacaggcatgagccactgagcctggccaatttgtatcttgtaaatgcatatgttctgaaaattatgattaaaatataatcatagattaaaacatgataatgaaacttacgatgagatatttccttcaaatttttggttttagtggcggcatgattttgtgcacggatggataaaagtacctgtgactcatgaaacacaggaagaatgtcttgggatggcagtgttagatatgatgagaatagccaaagaaaacgatcaaaccccactggccatctataactctatcaggtaattttcttttgcaaatccttacacataagtgtgagtagagattttatataattcgtatatattttctgtgtttacccatgccttttgattttgtaatactagttaagtactccttatctaaaatgcttggaatcagaaatgcttcagattttggatatttccagattttggaatattggcattgaacttaccagttgagcacccctaatccaaaatgctctaatgagcatttcctttgaacatcatgttgacgttcaaaaagttctggattttggaacatttcgtatttcagatatttgcaagagggatagtcaacctataataaaaaatcatatgggtaagttttatatcttgggagtaaaacacactttgtaaggtgaaattatttaaagagttgtactacaggaaatatcataggtattaaatatctattatttgatttcatttattctgagaaggctagggaagttcagaggaacagaagaaacacctggaggcatactttttgatagaagatcctccagttggctatataaatgacctgaataagtatttcccaaatggtggtgtatattttatttgcattagactcacgtgggggagcctgttaaaatcaaagatttctgggtcctaatccaagagatttggattcagtaaatctgagttgaagcccacaaatatgaatttttacagatgctctagggtattcttatacaaatggtccaaactctgcattcttcaaattattcttctgcatattgaacttgacaatcatggctaatataaaactgctttttaaaaaggtatatataagaatggtttaagtttgaaggcaaatatgtattttatatattacatacttcccagattaaaaatttgagtacatcatgagtgtggttaaagcttccttttttgaaattgttctcccaataactggcttcagtcatttctttgccatgtcatcaaaacagttacatacccaatttgcagagtatcaatttctgtatttctctctttggttttaaatattcttgttttactttcagatgtctgttaggtcttaacctaagggtgtaggccatagggtataattttaggaactcagaaatctagaagattccaaagcccaaaggaaaaaaaaaacacattcattcattcaacagctacttattgaatacttgctgtatgccaggctatagtagaacatagttggaggaagagtatcttagatgtcgttacatagaaactgaaggaattcaggggaacacagttgaagaacagaagctttgacccattgaagatgaatgttataaatatgaagccatctctagacttaagctatcgtggaatatttctgctttggaaaccatgctgtcatccaaagtcttggcacaatctttctatgtagattgtagtttcttccagtttgagaatcatgtcatctattgctcttatccctacattatttagtctagtgtcctaaacctaatgactatttagtaactatttatctgattcttttaactcatgctcttagccaggatataaacacagatgcaaaatgctgcatcatttttttttactgctttactttaaaaatagtgtagatattaaacattcatataagattccatgatattttaaaagagtttattgagataatttacaaatcataaatctcacccatttaaaatatacaatttaatattttgtattatattcacagggttgtataaagatgaccagaatctaattttagaacatttgcatcctttctgaaagaaaccccatgcccattagcattcagtcctcatcccactttcccccagcctctggaaaccacttatctttttgtttgcgtggattttcctgtctcaaacatttcatataaatagaatcatgcaaaatgtggtgtggcattttttttgtctggcttctttcacttaatatgatgtttccaaggttcattcatgttgtagaatgtatcagtacttcatttctttttattgctgaatcatttcattatatagatataccacattttgcttatttgttcttcacttgatgaaaatgtgggctgcttccatgttttggctattgtgactaatgtggctatgaacagttgtatatgagtaattttgtggatgtatttttttcattttttcttgtgcatatatttaggagtggaattcctggaacatatggtaactgtttaactttttgaggaactgcttaacttttcaaaagcagctgtgccacattacattcacactagcagtacatgaagagttccaactctttccgcacttgtttctgtctgtattttatccatcctagtgggtggaagtgctgtctcattctagttttgatgttcatttctctaatgactactgatgtttggcatcttttcatgtactttttggccatttgtatgccttctgtagagaagtgtctatttgaattcattgctcattttttaattgggttatttgtcttttaattattgagtttagaaaattctttttatattctggatacaagtctccacatataatcatatttatgatttgccattatttcctcccattctgtgtattgttattttactttcctgaaggtatcatttgtagcacaaaagttttaattttgaagtagtctaatttgccccatttttctttgtgtcttgtgccatgtggaaatgtggttttagcaacatggatgtctttcttggttttagcaagagcagtttctcttgaaataatggaacagaagccaaactggaatgagttgagggataaatggaaggcaagaaaatggaaatggctatgtacatgctttcaaaaagaggccagataggctgtggccagaaggaaatgtgggattaagagattttacattttatacgggacggacattaatttagcaagtcctttgtgcctgtggattctacatctaatatgccacagaatgaggtccagaaaggcttcctggattagatggtacttgagccttgtcgaatgagtaactagataggagatggatgattggaagaaagattagcatatattacggcatggaaaattatttaatggtacttcagaaataaaatgttccttagaagcacagaaataaattaccttctttagaatattgtacatagagatgaatgtacagaaaagtcagaatatttctaaatggaattgttttgatcacaaaggaattattaggagttgaagctggcctaacaaaataatatacagaagtatgtttgcataatgaaaatggcttccaacaaaatgtaacaatttccaaaattcaggtaaatgttggagcacagcatcataggaaatatttgtagcacagttcaatatatgccaaaatattatcttataaaccattaactctggtatgtgaaatagagaaaaggaatttttagagattcttattaactagactgaggattcatttcattaggggaagaagattaacatcttcttttgtaaacattgatgataacttagagtgtgtggatatatttatatcatcaaacaaaatcttaaagttttatactgtatggatgggggttatgtcaacttacgccacttggccactgtgttgtaaggcctacttaatcatggaaaaaggtggtaacttctttttcaatttttagatttatcttccaatttttgttttgttttgtttttctgtatgtgcttttttatccctagctacaagacattcttaccaaaatgtattcgagcaaagatccaagactatcatattttgacaaggaagcgaataaggtacagatttcgcagatttattcagcaattcagccaatgcaaagccactgccagaaacttgaaacttaagtatcttataaatctggaaactctgcagtctgccttctacacagagaaatttgaagtaaaagaacctggaagtggtccttcaggtgaggagatttttgcaaccattataataactggaaacggtggaattcagtggtcaagagggaaacataaagaaagtgagacactgacagaacaggtaatccttaatgatatgttcttgttctttgttattttaagtacaatggaaataaaaacaaagtaattttaatcatttgcaacatggtattgcacttctcccatttgatagaagtggaagtttttaatagcgtgaacctatcaaggtcatataattctttgcctactattcttaaatggttttttcatttaattttttatgacaaaataattaccaatgactatattatagtttcagaaagatgtcaaattctaaaagtgattttaaaggagttttgcctttcactactagtgataacagaaggcataattataaaacttgttaactagaaaagattgatattaattgattttatgataatatatacctgctaaataatgaatttattttaggtttgcattgcaagttttgaatttgttaatatccgtgttgttcatagattgttactagagatttagagggatcattttttaatttttcatctttggtagtcacatttccagttttctggcagtggtttctactaatgttaattgaattgaagagtgccatagcacattttagattcctggcatcatttaatgccctcatttttaagtcaagcaagatacagcatagtcttagggttagattgatagagtaaatcacgtttaatgcttatctattgttatcaataccttttttattttaaagaatttggaaagaatgttgtcttcttaagtcttgttttaaaatggctctgtaaattctacccgtttttaattttacatgcttttaattataggatttacagttatattgcgattttcctaatattattgatgtcagtattaagcaagcaaaccaagagggttcaaatgaaagccgagttgtaactatccataagcaagatggtaaaaatctggtaagtttgctttatgattgaataatggtttcattttatagttctcagaaatgtgtattttagaatcttagtaccaaaattattttctggtaggaattttgattgtagttttaaatataactctaaacatcagttcagtaaactttttgataacatctagctttttgtattactatcaacaccatcttcctacagagtttcttgtacattactgtactttttttactcatttttatgattagcaaagcaccagttactttctcccccatccctactctagattatactagttctctgatgtaatgctcacccctgactaaaatattttatcaacagggatgtatatgtgccagttatactgcctaattaaaggagaaaaaataaatcaatgatgtctggaatttatataacaaaatgtaaatcaatcccaggtcagccccacccaagctgtaggacatggttgattctaaaagattaacgctttctctttttttaaatagcttcagaaatctaatttattttaatgtaaataggagaaatgaattattttatactttgctcttaagtttctcatttatcttctctgtcttctttttaactcagatgcttcttgacccttcctggcttaaactagtcctattaatgttatttgtctatttatcttaagtatttatatggcttacctgtctggctgttccagggttatattaccaaaattgtaactaacttgcaactcacttaattcagcatagttttctgttcttagataaaaatatgatagtacacctactgcctagtagactgtgagccttttgaaggtaaggatcatatttttatgtgtgtttgtaccccctacaccttgcacagtactcagggcctagtttagaaaaagcttgataaatattttatggatgcataaaaggatgattaacaattatcaacctcaatgtggatatataataaatgtttctgggagagtttattgatcttaatgtgaacaaactgtagtaacccaaagaacttctccatgggactgtatttggacttggcttaattttaagtctgcaatacagagaagttaagtaactttccaagggcacagtgttagttaagtggtagggctatttaaactcaaatgcatgctttgaaaacctaagctcttaagtgtgacactaacttctttgctaagtatccgtaaagctccttaaaaatattatactgacattttgttggaattgtgcaacaaactgggaagagttgacatttctttctcatattaaattttttattttagggatacattgtatttctccttgtatacaagtattattttatgtttttcagtaattcttgatcattttattcatattgatacatcatgtttcttgctgaattttattcatgatatgttatgctttttctgttgtttattaaaattaatacttcttctctgtgtattttcctaccaaattatttatggatataggaaagtaatttttgcttattattgcattttcccagtgtattatgtgttagtaacattttgtttttactgtcattttcctcttcattctggcatttatttctctttataattttggtaaaatatatataaaataaaatttagcatcttaaccatttttaagtgtacagtttagtagtgttaagtatattcacttttgcatccaatttccagaactcttttatcttgcaaaattgaagtctacacccattaaataaaaactcaccatttccccctcttcccaatccttgcaaccagcattctactttctttttttttttttttttttttgagatgagtcttgccctgtcatccaggctggagcacaatggcgcgatcttggctcactgtaacctgtgcctcctgggttcaagcaattttcctgcctcagcctcccgatagctgggattacaggtgcacgccaccatgcttggctaattttttgtatctttagtagagacggggtttcaccatgttggccaggttggtcttgaagtcctgacctcatgatccgcctgcctcatcctcccaaagtgctgggattacaggtgtgagccactgtgcccagcccctctactttcttattctatgaatttgactactctagatacctcataaaagcaggctgaaacaatactgtctttttgtgacaggcttatttcagttagtataatatactcaaggttcatttgtattacagcatgtatcaatttccttcatttttaatatatgtatgtattctgtgtcatgtatataccacatttgttcattcatccatcaatgaatattcaggtcacttttttactttttgacaattgtgagtaatgctgctgtgaacatgggtgtacaaatatctcttgaaaactctgctttcaattcctttggatatataccttctattagtccgttctcacactgctataaagatactacctgggactggataatttatttaaaaagagggtttaattgactcgcagttcggcatggctggcccaggaaacttaaaatcatggcagaaggtgaagggcaaggaagccatgtcttacatggcagcagaagagagacagtgtccaggggaaagtgccacttttaaaccatcagatctcatgagaactccctcactatcatgagaacagcatgggggaaacaacccccatgattcagtcacctcccaccatgtccctccctcgacacatggggattacaattaaagatgagagttgggtggggacgcagagccaaaccatgtcatacctagaagtagaattgctggatcatatggtaattctacttgtaattttttagggagccaccatgctgttttccatagcagcggcaccattttacattcctaccaggagtacattctccacatgctcatcaaaacttgttattttctgttttctgatagtagccatctgatgggtgtgaagtagtatctcattgtgattttgattcacatttccctaatgattagtgttgctgagcgtcttttcatatatgtattgccatttgtatatcttctttgaagaaatatatattcaagtcctttgctcattttttaatcaggttttttttgctgaattatagaaattatttatgtattctggatattaatcccttttcaaatatatgatttgcaaatattttctcccattccatagattgcttttcactatgttgcttgtgtcctttgatgcgcagatgttttaaagttttagctagttcaacttttgttgcctatttttctttttactttgttgagatataacatgaacccagtaaagcacactaatcttacgtgtatagctcaatgaatttttacatatttgtacatctttgtagccacacccacctcaaaaaacagaatagttctcttactcctagaaggtttccacatgcatcttcccacatattcacctccacccctaacttaagatacctatcatctaccatcacttagttttatctattaataaaggttgtataaatggaatgatactgtatgtattcttttaaaatctagattcttttagttagtataatgtttggagattcatttatgttgttacatgtgtcagttcattcctttttattgctgggtagtattgaattgtttgactgtacctcaaattttaaatgtattctgttgatggacatttgggttgctttcactttggggattttagggataaatttaccatgaacattcttatacatattttttggtggacttatgcactctttttttgtatatatatatcctagagataggattattgagtcatagtgatagctttagtatactgccaaacaattttttgtagttctatcagttcactcttctttcagtaatgcatgaaaattacagttgtctcatatccccatcaactcttaattttgtcagtctaaaaatgtcttagtttgtctggtggatgtgtactggtagctattgtagtttttattttcattgccctggtgagtaatgatgttcaatactttttcacttacttattgttcatctgaatatccttcttatgaagtgcctgtgacagtcttttgcacatttttcattgacttgtccctttctgatcaatctgtagagtctctatagattctaagtcttttgtaggatgtttgtaaaacgtatatagacatacgtcagagatatttctagttcagttctggaccactgcaataaagcaaattttgcaatgaagtgagtcacataaattttttggtttctcagtacatataaaagttatgtttacactataatcaagtctactaagtgtgcaacagcattatgtcttaaaaattaatttaaaacactttattgctaaaaaatcctaatgataatctgagcctccagagagttataatctttctgcttatgagggtattattttgatgttgatggctgctgaccgatcagtgtggtggctgcttaaggttgggttggccaaagcaatttcttaagataacaatgacatttactgcatcagtagactcttcatttcgttaaagttgtctctgtagcatgtgacattgtttggtaacattttacccacagtagaatttctttagaaatgagtcagtcctctcaaaccctgccactgctttatgtactaaactttattctaaatcctttgctgtcttttcaacaacattcacagcatcttcacccaggactagattccatctcaagaaaccatttttttatgcataagaagcaacttatctgtccaaattttatcatgagattgtagcaattcagtcacatcttcagctctacttctaattctagttctcttgctatttctaccacatcctagtgacttcctccattgaagtcgtgaacccctcaaagtcatccatgagggttggaatcaacttcttccaaattcctgataatgttaacactttgaccttcttccatgaatcactgatgttcttcctggcatcaagaatggtgaatcctttccataagtttttctatttacccagctccatcagatgaatcactatctatggcagcttagccttacaaaatgtatttcttagataataagacttgaaagttgaaattactccttgacccatgggctacagaatggatgttgtgtcaccaggtctgaaaataacatgaatatccttgtacatctctgtcagagcgcttgggtgaccaggtgcgttgtcaatgagagtaatactttgaaagcaatctttttttctgagcagatcttaacaatgggcttaaaatagtcagtaaaccatgctataaacaatagatgtgctgtcatccaagccttgttgttccatttatagagcacaggcagagtagacttagcataattcgcagagccctgggatttttggaatggtaaatgagcgctggtttgaatttcaagtcaccaatggcataggcccttagcaagagggtcagcctatcctttgaagtttgaaggcaagcactgacttctcctctctagctgtggaagtcctagatggcatattcttccaacagaaggctgttttgtttacatttgaaaatctgtttgttagtgtcaccatcttcatcaatggtccttactagatcttctggataacttgctgtagcttccacatcagcatttgctgcttcaccttgcacttatgctgtgcacatggcttcttttcttaaacctcatgaaccaacctctgctagcttccaacttttcttctgcagcttcctcacctctctcagccttcatagaatttaagagcattagggtcttgctctagattaggctttggcttaagggaatgttatggctggtttgatcttctatctagaactttctctgtatcatcaataaggctgttcactttcttataatttatgtgctcacaggagtagcactttcagtttccctcaaggacttttcctttggattcataacttgcctttttagtgcaagaggcctagctttcagcgtgtgttggctttcagcatgccttcctcactaagcttaatcatttctagcttttgatttaaagtgagagatgggtgaatcttcctttcacttgaatactcagtggtcattgtaggattattaattggcctaatttcattattgttgtgtctgagggaatagggaggcctgaggagagggaaaaagaaagggaaatagctattcggtggagcagtcagaacatatacaaatttatcacttaagttcaccatcttatataggcccagtgtgtggtgccccaaaacaattacagttgacccttggacatcacaggtttgaattgtgtgggtccacttatatgcaattttttttcagccaaacatggatggaaaatatagtattcacaggatgcaaaacctgcatatgtgtagggctgacattttgcatatatgggttctgcagggctgatttcagaacttgaatatgttcagattttggtatatgcaggggtcctgtaactaatcccccttgtattctgagggacaactgtacaatagttacatcaaaggtcattgatcacaaatcaccgtaacaggtataatagtaataaagtttaaattttgtgaaaattaccaaaacatgacacataggaagtaagcatatgctattggaaaaattgcactgatagacttgtacttgctccacttaagtttgtcagaaaccttccatttgtaaaaaaaaaaaaaaaaaaaaaaaaaaaaaaaggtcatatctgcaaggagcaataaagggaagtgcagtaaaacaaaatgtgtctgtatatcaataagagggatactagttagtgaactgctagttcaaagggtatgaatatttacaactttgatagattattaaaatacttctcaaaaggtgtttccaatgtatctgtacacctgttttcttgtatcctttgccaacactggatgttatcaatcttttaatttttctgccaaatcaatgggcaaaataatgctgtcctgttatatttcatttccttaattagaacctgagattgagcaatacctcatgtgtttataggtcagctttaatatttatacttctgtggattgccttttcatgtcctttgactagttttctttttttatttttaattgttttatacgttttattcccacaatgtatgttaggtatattcctttgttatacatgtttgtaatctccaagtcttttaattttgtttaggataccttttatagtacttgtttttttggctatttgtgttagctaaataccttttatagttcaaacatgtcacatgcttgtctctttattataatttttggttgaggactctattctgtgttctctttatgattatgtaaatattgttcattgctgggccaagaaatatgctgtaatcacattttcgttcttatataactttttccaggagttaattattgctttatgatttttcctttgtatctagctttattttcattttctacaagaactctgtaaagtagtggacttctcaatacaaaatttcacataatcaaacctgtcatatatgatagcatttttacttcttttctggagaagtacctcttcgatcacagcatcttactttgtagtgtggactggaagttttctgggtacagctattattttgtcagctgtaatttttggtcattcctttcttatcctggtaactatgttttcatctctcttatattggatctgattttctaaatctcatgtttgccctgtttttctaggtacagcctctggtatttgttggtatctttaatgtgattgagacaaattagaaaattaatttagagaggatttttacatttttatgatattgaattttcctaccatggttaatcttctatatatttaaataaaaagttgcataagagtgttttgaagtttttgttaattattgatattgcatcctctttgttacaaatggggcttttttcattatataactgactttttgtatgtaaaaatataatacgtctatatattttcccatgtaagtaacatgctgcatttttggctgactacatgttcacatatgtattaagatacaatcaggccgggcatggtgactcacgcgtgtaatcccagcactttgggaggccaaggcgggcggatcattaggtcaggaatttgagaccagcctggccaacatgttgaaactctgtctctactaaaaatacaaaaattagccgggcgtcttggcgtgtgcctgtaatcccagctttttgggagactgagacaggagaatcgcttgaacccaggaggcagaagttgcagtgagccaagatcgcgccattgcactccagcctgggcgacagagcaagactctgactgggcgggggccacaaaaaaatcatagcatagctacatatcctaacattttagtttgtagcatgaatactttagcagtatgtaattggtatgtagggctgatgccgtggctcacgcctgtaaccccaacactttgggagactgaggtgggtggatcacttgaggtcaggagttggagaccagcctggccaacatggcgagaacctgtctttactaaaaatacaaaaattagctgggcatggcggcatatgcctgtaatcccagctactcatgagggtgaggtgggtggatcgcttgagcctgggaggtggaggttgcagtgagccaagattgtgccagtgcacttcagcctgggcgatggagcaagactctcaaaaaaaaaaaaaaagaaaaaaggaaatgctcatgatttctaatgtcaacttttatatcatattaaatagatttctagctgagataactggtatattagtctaagaaggacattggaaaataaagtaaaatgatggctatagagtgaactataactgggaaggtatgataatctgtatttaggaggatcttaaatatcagacatgagaatttgtaattcatattgagtactgagccataaaagatatgagcaatttagaagaaaattgtatttaacatggaatgaagaaaattttcaatatttaacatggagttgactttctaaaaggtgctatttctttttcttttctctgcttaggaaattgaacttagctcattaagggaagctttgtctttcgtgtcattaattgatggatattatagattaactgcagatgcacatcattacctctgtaaagaagtagcacctccagccgtgcttgaaaatatacaaagcaactgtcatggcccaatttcgtgagtaatacagacttaaaagtaaatttttagaaaagtaaatgctgtatttacaaagaagatttaacagagtgatacatgtatgtttagaaaaaaataatttgacaagttttttttaaacaaaaggctatttgcaatcagattacataataattagaattatttagtgtataatttaccatctgtatcccaatctataatatttataagttgtacaagtttaacatttgttaatcatgcctatgtgtgattcactcctgcatgttactaaaaaagaaagatctccaatttatgttttattaattttaaaatactgcaaggaagccacagtgcaaaatttgaaaattctttatgtttggatagtccatctccttctactgaaaggttcaaacacaagatatatatgatgtccacatttctagactagtgctatgtagaacttcctgcagcgatgaaaatattctatatctgtgctgtgtaacacagcagccactagctacatgtggctgtttagcatttgagatgtggctaatgcaaccgaggaactgaattttaatttaattttaatttctttacatttaaatagctacatgtggctagtaactatcacattggctcacacagttgtagatccttactttaatactgggtaaagctagctatcatgcataacatctatttagcttaagtcctaatgatctcttagctaggatgtggtttatgttgacaacagatttgaataactcgagcaaagggaaaatctgggatcatgagcatattatgttctttgcatttaacctacccctaaatatttgagaaaatacatcttgggtaatataaagagttgatttagtctatgcttaatatttatttagtaatgaatattgttgctatgaaaaagttgtactacttgaactttatgtctgtaatttacatgtttaatatttttaaaactccttgcctttattcatgtatccataaattcattcaaacattcttttatttatatttactgagtaactactatgtgcaagcattggtttgtatattagaaatatggtgataagtgaaacagaatgattctttcttttgtatagattatattttgcttttctttcagggtgtgcagcttcagaaaacataaaaaattttaaaaaccagtagtctttgtcagttgccatggttcttctcttagactttgttatcgtactgaataataaaatcatgcattcagatttttatgtcagtaactgctatggtagtagagatataagtattttctgatatataatctttatagttaaatgaaggtttctgagagtatggttttaaaaatattaactttgtaatcagcaggcagaaaaatcaaatgaacaaattgttctttgtgattttgtcttataaataccttttattggtttttaaagctatataattgtcccttgaagtggtttgaacttactgcaaaatagcttggtactttgattttttcctttgaaagattattgctaaacatataaagtagaggagacaattctgacagttttagatttgacttttgattgttttagatgacacttggtcataatattatggtgcttgatatattattcaaattgcttcttctttacctttaggatggattttgccattagtaaactgaagaaagcaggtaatcagactggactgtatgtacttcgatgcagtcctaaggactttaataaatattttttgacttttgctgtcgaggttagtatgtcacacttattagtggtaacactttatttagttcatttaatttcctctccatatttatttaccatatttcctttttaatactgagaattatagctttggatatgataactagtataatgcttaatttcctcagagattctgtacaaataaacaagttataattcccagggtttatataaaaatataaaataatttataatgtctatctttttattttgcatttattttattttctgatgttttggtgttaccagtgtgttaaaaggtatttcatcaagtgtcttgatgtttctttgtttgcaaaactggaaatctttgccacatcatgtagaacaaaataaatcggaagcaaattttctgtttattaacagtggttgcagaattagaggaaacagaattagagaaaactaggtcaataacaaacaaatagaaacattaaagcacttttaactgatgattttctaatatttttaagaatagtggtctacaatgcatgtttcaacggtaaaactgcaatgaaaccccactgttaatacagatcattttggatctcatctatgattatatactatcacttatgaggcaatttcatggtataaatcctaagaaactatagaagcttgcaaatttatcttgcttttttaaaacagagaaaaataagaactttgttattcaattattttaatttttataaaatgcaacttatatttggcatatgtagagggtagattacttacagaagggaggttatgccatcactttacctttgtgtaaaactggtaatctatcctaatttcaaagtatcctgttactataacagataatagtacattatattcaagtatgaattcaaaaaaatatatatatatattttatgttcactgtatgtgccaagcctaatatgagagctatgtattatagagtttatgctacagccctaccttcaggaaacttatctactggacaaacaaaaattttcaaatatacaaaaaattctaaatcgaacattgtaattatctagcataggcaaatatagacagtaacagacaggtttacaattattaagaaagggcagccaggtgtggtggctcacacctgtaataccagcactttaggaggccaaggcgggtggatcacgaggtcaagagattgagaccatcctggccaatgtggtgaaatggtgaaaccctgtctctaccaaaattacaaaaattagctgggcatggtggtgcgcacctgtagtcccagctactcgggaggctgaggtaggagaagcgcttgaacccgggaggtggaggttgcagtgagtcaagattgtgccactgcactccagcctggcgacagagcgagacacggtctcaaaaaaaaacaacaacaaaaaaaaaaaaaaacaagaaaggttatttggcataggaagaacctgattgaccttgaggtattggtagattttatataaatgtttctgagtagaatgaatatgtttataaaatgcaccttaaaaataggtgaacaagttcataatatagtgcataagacaaatatttaaaaactgcaaaatattaaaaatgtaatattaaagataattatacaaatacaatggtggtgcagtggaatggctgtatgttcacctttgcttgtgcaaagaggtgagcattagagaggacctcttagaaacagtggtacttgaactgagttttgatgaatgaataaaggttcattgctcagaagaagtgggtatacattcttaggtagaaagatagcatgaagaattatcaaggcatgaagcagcatggcatttgcttgaaatgatttaagtcatttaatatggctggaacgtaggttgtatgttggcagtggcaggagctgagattggagatggaggcagaaaccagctcatggaaggctctatatgctacatttgttttaggctttatcttataaatgatggaaaactattaaggatggtattgttgctattaattatcattgccttcttacatgctttttcataaaatcaacttttaaaccacttttgtaggctgagaaattgtaaattgcccttttgaggaactaagtacttctatcactatactggcactacatcggattcatggttcaaatgtttattctgttgcttgttcttgtgatatcattttgtcagaataatcactgtgatgtccattgtgactatccctccctttctttataattaaacttatacagcgagaaaatgtcattgaatataaacactgtttgattacaaaaaatgagaatgaagagtacaacctcagtgggacaaagaagaacttcagcagtcttaaagatcttttgaattgttaccagatggaaactgttcgctcagacaatataattttccagtttactaaatgctgtcccccaaagccaaaaggtaagataattttctagttatttttaaattactggtcatggattgtttatgtggcgtgaagtatcttcagtacattgatttcaaaggatatatgaaagaagcagctctaaaagttaattttatcttattctattgtacaagcatcatcaaataagattgtttactttggttttggtggtctagaagtgacttgaagttcaattattctaaaatgagattttaaacataatgtgtggtatgatgtcatttattgaactggaagatctcactactaaattcttatgttgttttaagtaaaaattttcatatacttcgaggattttaatttctgtattttaaaaataaagacagtaaagttggaaattccttgaaataatgagccttactattaaaaattattaaaattcctgaaaaattgtatgagttaaggaagttactataattttgaattaatgaaataactggcaggaatacatcaaaatccaaattacattagttaaggaagtgattataattttgaatgtatgaagtaactaagaagaaatatcaaagttcaatgagttgacccctaaaataattttctattataaaaaaagaacaattaggagttattaagcatttcttatacgtagaacacatttcattttactcctctttggagcaattcatactttcagtgtattttgaagtgatatatatgtattttattttttcagataaatcaaaccttctagtcttcagaacgaatggtgtttctgatgtaccaacctcaccaacattacagaggcctactcatatgaaccaaatggtgtttcacaaaatcagaaatgaagatttgatatttgtaagtcattagatactcattactgtcttttttgtccttttaaaacaacatctgttttcttgatttacattcatgtgacattggaattattttgttatatacaaatttagttgtgatttaaatatttttcttatgaaaaatatgccaaccttgtgttagatgttagcaaaattaattatcttaattatcctaagaatggaatcttaattttctttttggaaatttaaaaatgattcttcacaaatctcaaattaaaaattaaaaatctacaaagacctatatcgcaactcccaagttctcaagaaagtaagggaaattcaaggggttaaaaataaagaagaaactgagaaaaaaatccagccatctctcagtgtccatgagggattggttccaggactacccatggataccaaaatctgaggatacttaagtggaacctgtggatatgaaaagttggccctctatatacatgggttttgcatcctatgaacactgtatttctttttttaaataactaattattttttaaaattatttatttatttattagagcaggacttgctgtgtcacccaggctggaatgcagaaatactatattttccaactgagtttccttgcagatgcagaacccgccctgccagtacagagggcccactggatttattgaaaaaaacccacatataaatggacctgtgcagtccaaacccatgctgttcaagggtcaactgtagtacataagatctgataatctggcagtcaggtggtgagggttgatgatcagccacatttatcaagggggttaagatttaagagcaatttaaaagggccaggtctcagacctgtgcaaggccacgagttaaaagtgagactatccctgagtaaaaccaggacacttaagtaaatacatcctcagtaaaacaatatatagaatgtgaaaaattcacccactagcaagcagagaagaaaaggaatattgtcatttttaactgcgcttctggtgaggaaaaggagtctctcctaagaatttgtcatcataagctttggaatttgggcttcattatactacctacatagactgagaaatcctaaattaaaagtggtactctcctaatattgtgtggtgcttggaagaaacaaaaaaatcttttcggaaccacatactcttaacctaggcaacccataattcccacagataaaagcattgcaaacacaagcttttaatagaaaatttagaaacatacaaggaaataatgcaggattaattaagagtcagtagaccaacaaacatcaaaattagaactccaggaacttcctatcacagaattttcagatacagactataaaatacatatacatgtttaaagatagaaaaggaattgaaaccacggagaaataacaagacattgttttaacaaacaaaaaagatgtcaggaaaaaggcatagaaatgataaatatcctcattgacattaaaacagaatatacaggatgaaaagtaaattacttatagctgaagagagatgtagtgaacctcaagacagatctgaagaaattaagaatgcagcagttagggagaaagaaatggattatatgaaagagggattaagtggcatggaaggcaaaatgagaaagacccaactcatatctgagctctataaggagacaatagatagaattagccagaatggtaaagacaagcatcttcatgtgagtaacaggaaacagagtggccaggtaacttgactaacattacaaatctaataaatagtagaccttggatttgaacacaagcagccttactgcagagtgcaggctttcaacaattactttgtaaagatatgcaagaaatactagtattagtagtaatagctgatacttaatgcacatttactatgtgtcatggactgtgctaagtgcttttatgtatttattcacttattgatcataacaatcctatgggaaaatagttattattctcatttttcagatgaagaaaccacgacagctgcagcacagagattaaatagcctgtacaaggtcatacaagtggtaataagagaaagtcagatattctgcctctgcagaccacattctctagtgtgctagtaggaaaggcaaagaaaatgattcccatgtaagcaaatgtaggtaaacactgactctatttttaaaaagtgacaattatagcccattcaggagatttcaaaaccgagtagagccaaaatacacttaattcattaatccttgttttctgtctcttattactatttaaggaagcagaataaaagcattaatttggagtcttaaatctggatttagattctaaggaaaatacttgcttatggatttaaaaaaattcttcctcattgaatgtattttcttgttcctacttcgttctccatctttactcattcttttcttttacctttttctcttgaagaatgaaagccttggccaaggcacttttacaaagatttttaaaggcgtacgaagagaagtaggagactacggtcaactgcatgaaacagaagttcttttaaaagttctggataaagcacacagaaactattcagaggtgtgtatgttctttatattgttcatgtagtttatgctgtttaaagatgtgctctcatatgcatacaacgtactcatgtgtgcagcttttcaaaattgtaatttttaaatgtgtcaaggacttttctgaggatacattcttgtggggctatagaattacagggtttgaaaattaccggattaaaaaaattaattccaaactaattatgtttagcattatgttaggagtgttattacatttctgcatatactgtggccttgattttcaaacttggctccccagagctttatgggttacacagaggctcctctacaattacatttatttgaaaaaaaaacaaaaaaccaagtttcaaaggcactgtactaaggaacatgcttagtgaaatctagatgcctctgggcatcatccagagatgctagctggcagaccccgtggccagttgccagagctctgaacatagcaagatatgatacttacaatatcttaaagggtgttggtgttagaagatgatgtgaaaagttcaagccaaagagttgttctaatccagaataccacagtattggtgattgtgattcactaatcatacccaggggttctagtcacagtttagttgaattagagtgatgttaaaactatgctagtatcctgacacagatgtcgtgatattttatctgcacattcttaattctttagcaagtgttatttaaaggctacatccatctacctcagtttcctatatctatctctgacatctacctctagttgtacttctgtcctctatttcaggtgttatgggtcaagcctgtttgactggcattattcatgattcctgtaccactcttgctctctctcactttgatctccatattccaggcttacacaggggtttcctcagaacgttgatggcagttgcaggtccatataaagggaccaaagcacattgtatcctcatctatagtcatgctgaaagtaggagaaagtgcatctttattatggcagagagaattttctgaactatttatggacaacagtcaaacaacaattctttgtacttttttttttccttagtctttctttgaagcagcaagtatgatgagcaagctttctcacaagcatttggttttaaattatggagtatgtgtctgtggagacgagagtaagtaaaactacaggctttctaatgcctttctcagagcatctgtttttgtttatatagaaaattcagtttcaggatcacagctaggtgtcagtgtaaactataatttaacaggagttaagtatttttgaaactgaaaacactgtaggactattcagttatatcttgtgaaaaaggaaagcaatgaagttaaaagtagaaggttacaatgcccaaacaatagagtattatagtaaacaaatgtctataaaacattttgtgttcatgatagcaaaagagattatggcaggttcaacataacattggaataactggccttttcagtacaaacttatctggaattatgaagacaaagcatataaatgatacacttaatttttaatggaactgacagaaatgattatgttgatatgatactagatatattttttggctaaatttaggtgttcacagaaactactaaaagtataaatcgtaccccatgctttaatactatacaggcatgcctcattttattgcaccttgctttattgtgcttcttagatattgtattttttacatattgaaggtttacggcaacccagtgtctagcaactctgtcagcaacattttcccaacagcatgtgctcatttcatgtctctgtgtcatattttggtaattctagcaacatttcaaactttaaaaaaatcatatggtgatctgtgatcagtaatctttaatgctagtattgtaattattctggggtgtcccaaacagagagaatataagaaggcaaacttcatagatgaatgcagtgtgtgctctgactgctccatcaatgagccattcctctgtctctctccctctcctggggcctccctattccctgagacaacaatattaaaattaggccatttaataatcacacaatggtctttaaatgttcaagtgaaaggaagattcacccgtctctcactttaaatggaaagctagaaatgaagcagcaaacgctgatgtggaagctgcagcagttatccagaagatctagcaaagaccattgatgaagatggcttagagaggaaggcatgctgaaagccaagacaagctgaaagctaggcctcttgcactaaaaaggcaagttatgaatccaaaggaaaagtccttgaaggaaactgaaagtgctactcctgtgagcacataaattacaagaaagtgaaacagtcttattgatgatacagagaaagttctagatagaagatcaaaccagtcacaacattcccttgagccaaagcccaatctagagcaagatcttaatgctcttaaattctatgaaggctgagagaggtgaggaagctgcagaagaaaagttggaagctagcagaggttggttcatgaggtttaagaaaagaagccatgtgcacagcataagtgcaaggtgaagcagcaaatgctgatgtggaagctacagcaagttatccagaagatctagcaaggaccattgatgaagatggtgacactaacaaacagattttcaaatgtaaacaaaacagccttctgttggaagaatatgccatctaggacttccacagctagagaggagaagtcagtgcttgccttcaaagcttcgaaggacaggctgaccctcttgctaagggccaatgccattggtgatttgaaattcaaaccagcgctcatttaccattccaaaaatcccagggctctgcgaattatgctaagtctactctgcctgtgctctatacatggaacaagaaagcctagatgacagcacatctgtttatagcatggtttattgactattttaagcccattgttgagacctgctcagaaaaaaagattgctttcaaagtattactgatcattgacaatgcacctggtcacccaagagctctgatggagatgtacaaggatattcatgttattttcaggcctggtgacacaacatccattctgtagcccatggatcaaggagttatttcaactttcaagtcttattatctaagaaatacattttgtaaggctaagctgccatagatagtgattcctctggtggatctgggtaaagtaagtagaaaaacttatggaaaggattcaccattctagatgccaggaatagcattcatggttcatggaaggagatcaaaatggcagcattaataggaatttggaaaaagttcattctaaccctcctggatgactttgagggatatggtactttaatgaaggaagtcactgcagagatggtggaaacagagaactaagaagtggagcttgaagatgtgactcaattgctacaatctcacgataagccctgaaagaaggaggagttgcttcttatggataagcagagaaagtggtttcttaagatggaatctactcctagtgatgatgctgtgaacattgtgaaatgacaacaaagggtttggaattttacataaacttgattgatcaagcagttgcagggtttgagaggactgaccctgtaaagttctactgtgggtagaaggctatcaaacagcattgcatgctacagagaaatctttcatgaaaggaagagtctgcagtgaatttcattgttgtcttattttaagaaactgccacagctacctgaactttaagcagccaccaccatgatcagtcagcagcgattaacatcaagcaaaaagattacaactttctgaaggctcagattatcattagcaccttttttggcaataaagtatttttaaaaagatatattctttgttttttttaagatataacgctgttgcacactaaatagactccattatagtgtatatacaagttttatatgcattgggataccaagaaattcatgacttgctttattatggtagtctaaaaccaaactggtaatatcttcgaggtatgcctttattttagtgcctcacaaagtttacattcaagaaaattgtttatataattccctattttccactagtaatgcagattaaatacacatctacacttgtatgacattttttcatatctttgaaaattgataatcttctcaaaagcagtggtttggaacctgttatatggaggtatctgagaggctcctgtggaccatgaaggaatccaggattgtttttggaagccaacacttgtttttctggcaaaatatgttttatatatttttttaaaaaagttttaaagataaagcagcgcaaaacatttctgtattttttgcagaattaaaagattaaatggagctagaactcaaattctcctttatgtctatagtactatagacaattgttagtaatttttgtgtgtagaagaacttcaggaaggtttgaatgtctaaaaagttatgtggaagagaaattgagaaattttcatttatttttaaaaaccagccataattcagtactaatatataaaggtgtgctggtatattatatattatacatttatgttatatataataatatataattgtttagactcctactcttgctgttgtaagtaaactaaaaaccaaaaatataatgctgtgtatccattaagttttctttaaagttgtgagttttgccaatttaatttctttacctataatggtcacatgtaagtataaagatttaaattacatatatttaattatatttatacttaagccttattattattacttatattttaatgcagatattctggttcaggagtttgtaaaatttggatcactagatacatatctgaaaaagaataaaaattgtataaatatattatggaaacttgaagttgctaaacagttggcatgggccatgcattttctagtaagtagtacaacctttttatcaaaagatactattttattttataaaacaatatacaaattatctttacctggaaacaaaaaataaatctgtaattggatgccaattcatgtaaaatagtctgtgttaggtgataaaaagagattactttaggcatatgtttatgtatgtaaaatcacttttgaaaaaaaagttttgtcatcccatcaatatcttagaactactaatagacaatctgtatgttgtgtcttttggatttagaaaattcaaccaaaaattatgcagaagtatgtgcttctgtatttttgggccattgtacattatggtccatgagaaagcggtgttgacagagaagaataccagggggactgccagtcatcagacccctcagggtgcacctatgtcctgctgcagaactgaagtagtatttcttaatgtcagctcccatccagaaacacaaaccatgtcagccttagaactcatgtgaaatggcattggtagttttaatttattcatttcatcacaagcatagattattgtgttatttaaaatgtaaaacaggaagcataggagtcataaatttccttttttctcaatgcatgcctccaaattattatactatcatgtatttttcttctttaaatctgttttgggggcttgaacatactaaatgctccagtacttgtggactgatatttgaatatatgtgcgtttaactctaataggaagaaaacacccttattcatgggaatgtatgtgccaaaaatattctgcttatcagagaagaagacaggaagacaggaaatcctcctttcatcaaacttagtgatcctggcattagtattacagttttgccaaaggacagtaagttctagaaggattatatataatgttactaagctttacttgggcagtggtgtaaagggcatgttgttaattttccttgaattccatttaatttgtatgttcctgattaataataaaattatcacttttagcaatttaaattgttagttaaatcttagtctctatttttctttcttataagcatataaccatggactgtgaggtgattttttaaaaacagttttaatctctaattatgtatgaaggataggattttatccatttttagtatgaagttttgtaatattccttgagccacaagtaaattttctaaatattcttttcttctcgtcactaaataaaaatttagcctgagattttaggatttttttctatcctctgtgaagaaattagtttaattatccagctaattctgactttttaaaaccttaaaaaaactttgatttgtgtttgttcatctttactacttaacacagtgggttaaaaatacaaatttcagtcagatagttgagaggggttttttgggtctagataattataactgaattttgttatcttagataatttctctaattggatgttctaaatttagattctaaattgatcaatttttgtgcactgatgtgtcctatttaagctaatagtacttaaacttaatgacttatctgacagtgaagacagtgataactgggcagtagtacaggagtagggagtatggcagaaaattcttacagggtcttacatctggtatcctggaaaattttatcctttggaatcggaagtgaagatggaaaaaaatgtattcatatggtgaaggtatttgtcaatcaatctatttgtctgtctgtctatgtcagaataccagaaagtagggttatattgcttcttcctttcttgaatacagtccttctggtggaatcaaagaccacagaaactttacttgagaaattccgtgatttgagcagagcccacctatatcaattccatatatctagaatattttggtgcaatttagccttccatctgccataaatgcttgttggtccttgggtttttttttttatctgcaagtgggaattgccatggctattaaatcattagaacatctctgaatgatgtaacattacctttactacttacgcattatgaagaaataccaaaaagtatcatggggcaattttaggataaactatataaaaaaaaaagatttggccaggtgcagtggctcatgcctgtaattccaatgctttgggaggctgattgcttcctaaagcgcttgggtggatcacttaagcccaagaggtcaaagcatagtgagctgcaatcgtgccattgcactctagcctgagtgacacagtgacaccctgtctcaaaaaaaaaattttttttttttgaaggtaaaactaatggaaagaggttgagaaaatggtatgccagttgagacactatggtttaatggaaagattagttgattcagaactcactgtacaggattctaattctgtctctgctgctaacaaattgtgtggctttgggcagattactcaatcatatgtctccatgttgtcattgttaaagatgaaatattgaattagatgatcttgaaggtcccttctggttcttaagcttatgcagtcatgtgcatgtgcacatccaacccctccaaaataaagaaaataggcctgattattcaaatgatttgaactttaaagctatttacatataaaagattggtttacttgtgaattatttaaccctactctgttcgtatcatttaaaagttcttcaggagagaataccatgggtaccacctgaatgcattgaaaatcctaaaaatttaaatttggcaacagacaaatggagttttggtaccactttgtgggaaatctgcagtggaggagataaacctctaagtgctctggattctcaaagagtaagtttatatagactaagttagaattactctatctctgaactttcatatttctttcacatgatttgtattttttagcccatctaattttaaaaagaaggttggtgtggcattacacaatttattctcagtttgtggttctttaattatagaagctacaattttatgaagataggcatcagcttcctgcaccaaagtgggcagaattagcaaaccttataaataattgtatggattatgaaccagatttcaggccttctttcagagccatcatacgagatcttaacagtttgtttactccaggtatgtatttgaatgatcttattgattttccagctttctatctttattgtatttaatgaatcattactaatttttaattcctttaaaacattttcttgatgtcatttgggccctcttaatttcttatgttcatatggcttttcatgctttatacatattctaatctccttgactgagaattattttcatttttataaaaagaccttttctttttttttttttttttttttgagatggagtcttactctgtcgcccaggctggagtgcagtggcgcgatctcggctcactgcaagctccacctccaaggttcacgccattctcctgcctcagcctcctgagtagctgggactacaggcgcccgccaccacacccggctaattttttgtatttttagtagagacggggtttcaccgtgttagccaggatggtctcgatctcctgatcttgtgatccgcccgcctcggcctcccaaagtgctgggattacaggcttgagccaccgctcccagccaaaaagaccttttctttcagtaacctaattttagttttccatttagtgagttgtaaattatagtattttttttttgcttaaattgacttttaaaaaacaattctctttaacatttctcatattttataattgattgattctctaaacatgagctgtatttgttttgctttgttctctcctttttcaaaatactgagctgaaatgcatgtgtttgacctataggtgctttctaccccagtactactcacctttctcacaataagtatcagtatattaccttactttatgaatactaaaacttcttattttggaaaacaaaattttatcctttgcaaagtctctcttgaaggcctgtcagattatgggtaatgattaaaggctcccattaatataattgaaactatttgagtttccctgtatcatttagtatttttaactcacgattattttggtcaacttgaatgtatatcagtttagtccagagaatgttatttgctaatttaaggtgataatattctttatttctccagattatgaactattaacagaaaatgacatgttaccaaatatgaggataggtgccctggggttttctggtgcctttgaagaccgggatcctacacagtttgaagagagacatttgaaatttctacagcaacttggcaaggtaaattgtcagaattttttcaaatagagtataatcatttcatttaggaaaaacttaagagcgtttctaaagttcactttctacaacattttaaggagtgcttgtagaaaaaaaaggtttggttgtcagatgttggagaaatgctgtgttaaataaacagctatctttactgaatgaagggggccagcccctccacacctgtgggtaattctcgtcaggtgggaccagagactgagaaaagaaagaagacacagagacaaaagtatagagaaagaaaagtgggcccaggggaccagtgctcagcatatggaggacccgcaccaacactggtctctgagtttcctcagtatttattactgttttcactatctcagcaagaggaatgcggcaggagagcagggtgatagtggggagaaggtcagcaagaaaacatgtgaggaaaggaatctgtgtcacaaataagttcaagggaaggtactatgcctggatgtgcacataggccagatttatgcttctctccacccaaacatctcagtggagtaaagaataataaagcagcattgctgccaacatgtctcgcctcccgccacagggcagtttttctcctatctcagaaatgaacaaatgtataattgggttttataccgaggcattcagttcccaggggcaggcaggagacagtggccttcctcttttactaatcctccccagcacagacccttcacggatgttgggctgggggacggtcaggtctttcccatcccacgaggccatatttcagactatcacatggggagaaaccttggacattacccggctttccagggcagaggtccctgcggctttccgcagtgcattgtgtccctggtttattgagactggagaatggcgatgacttttaccaagcatactgcctgtacacattttgttaacaaggcacatcctacacagccctagccttaaaccttgattccatacaacacatatttttgtgagcttcaggttggggcaaagttacagattaacagcatctcagggcaaagcaattgttcagggtacagatcaaaatggaatttcttatgtcttccttttctacatagacacagtaacacactgatctctctttcttttccctataactgaagaacttttcagaggctttaacatgtaatgtgcatgaacatcttcaagaggaagatgaattaggcagtattattcaaattgacttgaccaagagactgttccttggtagcaggagttcattgttaagtgattcagtgaaatacagaaaggaatacataagcttttctgcctgcctttctgcctttagttatctcagggagaattaatcttattgcttagggtctaggattttgactgtgccatattcactagcagagactctgtctattaaaacgtcacacagtcatgtataacctacatattataagtaagaccagggaatgctcagttcttagtaggtccaaccatagtggtaagctctttctcgcataagcttgctaggataaggttctcactagtaagtaccatgttagtgttgtctgttattatcagctattcctaaattcatattttcctgaaatatctccagatgtcattgattttcctcttttctgggaacttatagcatttattgtttcttttatacaacttaatcacagtcttctgttgtttattagatcttggtttttgtttgcttgccctttttttccttgacttaaaaaaagttcctttagatcccaatagattactaggcacacaattttgtcatatattgtcaaaacaatggaatatatactggtatttaagaagtagacataacaaagaatacatcaaaagatcactaatttagattaacaaaagggaaacagcagactaaattataaagttatcttttcaagtaatttttctagttatgaaagtgatatactgcttatagagaaattggaaaatattacaatgaagatacgttccatttgttgtagtctctgcacaactacacaatttctttcaatagtgaaaccattctatatatacaattctatatcttgctatttttcatatatcaagattttcccattattaatattcttttgagacataattttaagtgaatataccataatttatttacaacattcccctttattgtaattttgagttaatgttcttttgctttttaacatttttagtgttttccatagttccgtgagcttaaaattcttttaaacataagtaaattgaagagactctaaggaaggcgttttcaaaatacatgtacaatgaaatatatttcttagtaatttagtttgtaggaaatgaaaggtaaatggtgtaatcattagtcagtcatagatattttaatgtggatatttcctatctgtatttaacaccataattttactttcatctttgtttgtttgaagtaattgatgtgttcagtggtttgtctagatatttgtactgccttactgaaacaatcaaaatgccattcctacaaaaatgattgcatgtcacctttccattttataaaaattagctactgtatccctttgttatccttttcaattagtggtatggtgaaaatattccaaagagggatatatatttaaaattattttcatatgttttaagccaagagaaataatggtatatttttttattttttaaaaaatattttcatactgttgtaaaaggagccaagaaactattgtgaaatcttttcttttgctatttgaaatctagagtgttttttgctttcttcctttatcctcatgcccacatatacttatattcttttttaaattaattttaacatggattatttgtgtaatagccttacatgtggatattaacagtgtaaacagtaccacatataaccatcaagacacctcaattagaatttataggactagaatgacagattcagatggtttaattacatttaaaaagttttctgaaaaaacttttgcaataaaacaaattgcccatcaataagtttgatatcttttaaaatgatttttggttatctgcacatgaagcaaacaaagtgtattccacaaaattcttaggcacagtctgagatagctgccagaaagaacagaaagagttgtcatttatgtcttgtgagtacaatttctgaaagttgaatgagggcgtctctttctggggatgagaagtttactgctctctcttattgcttcatggcagtactgctgggcaaggtaggttgtttgttttacaccatcactctgtaatacatactgtggagctctgtctacatctcccggcaaactgaaccatctcatgatcatagcattcatttctgggaactgctgacaggcaaataggacaggaccagtggctaacctgagattcacatcagctgatgttggtttgcctatgttagaacatgaggtgaagtcgaatacatcatctattagctgaaaagctattcctacattttttccgtactgataggtgatctcatgcaccactgggtcggggcatcctagaacagagactgctttacaactgttggctatcaggctcgcagtattcttgaaggtcttttcaaggtattgtgcaaatctctcatgctcattttcttttgacccgagctgaagaaattcaccacacaccaaatcttcaataactcgggttaaaatagatataacagctgtatttccagtttgtgccccacctatagatactacagaaagaattaaatctccagcaaggacagccttcttttcaccccagatcttgtgtgttttccttttcgagaacgtgcattatcaataacgtcatcgtgaacaagactagcagtgtggatcatttctgcaattaaggctgtggcgcgctggctagcttgcacatgtcgggagttattatgatgaatattacatgctcgggccattagtaccacaataattgatcgaaaggcttttccttttacatcaaagtagtactcagagatttccttaagttctgttgttgatatgagcggttcctttctaataccctcatacagacctttcaagtctctccaaccgagtttgaaaggatcggtgtatttctcaccactgtgtgttttgctgtacggggttgtgtgatgaaactgtgatatactatatacatttggacaggcaggtgttaaatgcttcacaagattaaaatagggtatctgagacaagtcaagtcccttctgcctatgagcctgcgcgggcatcggcagcggcgcgcggccccggcggccccgcaaggctcggggagcggtctccacgccgccggtctccagcaacagccgcgccgcccccgccaccagcgcgaggccacggtcggagtctgaaagtcgcggtaggatggtggctccgcctctggcccgcgatcctcctgccaggacctggagcctgaaacctcttatattctttatatcctttaccttctcgcttcactcctagcggttttgaaatcctctttattcctttttcctccatggtgcagatatgggattcagagatcaggatcttagtgcgactactttgaaattatcagcatcattctcaatcttctctgaatatgattcttattttcctctcttcccatcattagctaacatcttggtccacattccttgaatacttttagtactcattgttttctcatcaccttacctcctgccattattttggatgcccttccaatacttaaaaaaaaaattccttggcttctctaccccaaagttatgattatgttaaatgagttcctttgaactctataatcccatgtaataaccttacttagaaaatttcctaccctgaaatctccctgtctgactataactttatagcctttggcttttttcaacataaatgccttctttttgatatctttggtattgctagtgtctttcacactttcttcttattggaacgtaaattggtgaccctttctagagagcttctcatagagcagtttgtatcaagcgcgtttaaatgttcatatcttttaaactactttcgctggtatccacaattatatcacccccccttcccttgattatctgcttcactttccctattatttcctagtacgggaacaatacaacttagcatttttaaattgtgcttccatccctcaaacactaaaagaaaaaaatcagatataaatctttattgttttcattgaaaattggtttccaacattggttaggcacttatgactcttactggttgtattagtctgttctcacgctgcaaataaagacatacccgagactgggtaatttataaaggaaagaggtttaattgactgacagttacccatggctggggaggcctcaggaaacttacagtcatggcagaaggcacctcttcacagggcagcaggagagagaatgagtgccagcaggagaaatgccagatgcttacaaaaccatcagatctcatgagaactatcacgagaacagcatggaggaaaccacccgcatgattcagttgcctcccaccaggtccttccaatgacatgtggggattatggggtttacaattcaagatgagatttgggtgaggacaatgccaaaccatatcactcccttacttgatttctttcctggtcctatctcaaacccttctggttttctatcttaaatctttcttttcgctgtatttttcttcatctccttcttccataagaaaaatagaggcattccgaattaaaagtgagactgatttttgcctatcaaagtgacaaggatttagaaaaagtataatgatcattgttggcagggatgtgataaaatatacattttcccactgcttattggaacatcaaatggtaaccactgccagacagcttctaatgcagtgtgtatcaagtccctttgaaatgttcttatcttttgaacagctaattaagtatccttaatagagatgtacacaaatatttatttataagaatattattgcaatgacatgactgtatttaaaaatttttcttagtgtacatttatgtttccaatgttaaaattagtgcattcgtgtgacaatatacaataattaaaaattattaatttcaaggaatatatagtggcactagaaaataaattttatgaacacattgttaagtagaggggaagaagataaaacttatttcctacttttgttttctaaaatgtgttttggaataatttctcacaacagcctcatgagatagacattttattattctccactttaaggatgaaaaacctcattttagggagttctgaattgtccgcggtcacagagagagcaagttgtggatcaatattctagttccaatctgacttgagagtcctgggtcttgagagtcctgggtctatccaccttattgtgtggccttctaaactgtgtaattaagagatttaactttgagcctacatggtctaggttttttaaaaaactgacttcaagtatataactgaaaatatagtcacttagaatcttgtaactcaagaactacattgttttatcctgtaagaatgcaataatatccaaaatacactaatttgattaatatcaaaaacctatactttatttaaatgttatagcaacttaccaattctatgtacttaatgagttttaggtaaaaagagtggatttctttaaagacatcttcaaaaaaaaaaatgtagagtcatcccataggctaaaagtttcttacttcttaatttgctttggctgctataacaaaataccatagactgggtagcttaaacatcagacatttatttctttgaattccagggcctggaaagtctgagatcaaagttctggcagggattggtttctagtgaggtttcttcttggcttgcagatggccatcttcttgctgtgtcctcacatgggagagagagattgctctaatgtctcttcctcttataagggcactagccttgtcacattagagttccacccttataacctaatttaacttttatcacctcctcacaaggccctatctccaaatacagtcatattgggggttaaggcttcattatataaattttgggtaaggggtcactgacatttagcccataacagacacattccatccagatcactgacagtgatagcaaaaggtattttgtaaaaaaggaaaattcttcctggaagttagtgacaaaagtttaggaatcctcagcatgtcccttggcttatcttgacaattaatgctcatcatttatttaaatgcttttttgaagtaatttatatttcagcctataattccttttgaagaaattaaatttacagatttactacccacctgttgagatagtatttccttttcttgttctaagagttccttaatataagcttaaagatagtctgctgctgggcatggtggctcatgcctgtaatcccagcactttgggaggccgagttgggtggatcaccaggtcaggagatcaagacaatcctggctaacacagcgaaaccctgtctctactaaatatacaaaaaattagctgggcgtattggcgggcgcctgtattcccagctactggggaggctgaggcaggagaatggtgtgaacccagggggcggagcttgcagtgagccgagatcgtgccactgcactccaacctgggtgacagagcgagacttcgtctcaaaaaaaaaaaaaaaaaaaaaaaaaaaagacagtctgctaattccagctactagaattttctatataattataaaatttatttgtaatttgccttgaaaacttggtatttccatcctaatgtgatgtgtcatttagggtaattttgggagtgtggagatgtgccggtatgaccctctacaggacaacactggggaggtggtcgctgtaaaaaagcttcagcatagtactgaagagcacctaagagactttgaaagggaaattgaaatcctgaaatccctacagcatgacaacattgtaaagtacaagggagtgtgctacagtgctggtaagctgcccattgaaacctattttaaattcaaggtatgtgtttggcatcctgtgtaatataaatgtacaatgtcttaacgatctggacttatgccaatgcccagagggagaggcattctataatgactagagattgtgtttggtgatcatagactataactataggaagtatttggctagttggttaaacattcttttcacctcttgcttaagcttaccaagaaagtatcatttttaaaggaattgtttttgtttacattttctataaaaatatttttgaattcaatgttttttgttcgatatcaatgaggagaaaggaagttttctcatcagtttattttggtttgcctgaagagttatagaaaactgaaacgcaaatagtttcaaagcttttattcattcaaaagtttttgattcaaaaagactatgttcttaacaactatatcacctttaatgtataataaagttttgtcatcttagatttcatatatgtttaagtcatttatgtatgatagttttctaatatttaatcagtataatatggcagagtaaaacattatttccacctttatgttaaaaggtcggcgtaatctaaaattaattatggaatatttaccatatggaagtttacgagactatcttcaaaaacataaagaacggatagatcacataaaacttctgcagtacacatctcagatatgcaaggtaactaatatcctgattatttgctgtagatgaagcaaccgtgttgaagtagacattaggaaatcatctagacgttttcatagataataaagggaatatatagggttaagaccatttaaattgtttatatttataaaactagctgaaagaaaaatgttttatccatagggtatggagtatcttggtacaaaaaggtatatccacagggatctggcaacgagaaatatattggtggagaacgagaacagagttaaaattggagattttgggttaaccaaagtcttgccacaagacaaagaatactataaagtaaaagaacctggtgaaagtcccatattctggtgagtatatttcagtatgataaatgaaattttagagcacagacttcaaactttattgttgttatttaatagtttgccatttctatatttacagtaacagtgaacatttaagtcttttaagtcttacatttaactttttttttttaggtcttatagtcatggttatagtccacgtgggaaaatggcatatgctttatttctattaagtgttgtcttatttatagggattgtaggtttttcttcaaaactgtctcctatttattgaggcttaggggtaattattagtggtgctgtgggttgtggtattgtgttgaattttggtggggctttcatggggttaatagtcttttttatttacttgggtggtataatggttatttttggttatactccagtgatagctattgaggagtatcctgaaacatgagggccaagtactgatatttgaggggccttattattaggattattaatagagttgatactggtttggtgaatagttgaatatgatggggtggtgatcacggttgattttaatagcatagggagttgatttaatttttgagggggaggggttgattcatgaggattttgtaggtgcagctgccttgtataattatgggtgttggttggtggttgctggttgatcattgttagtatttttgtcgcaattgaaattactcagggtaatagattagataattaatagtagagtttaggcctttttggtcagatacagtaatggaggctgaagtttgggttcgtgaaatggtttttggtatagacttttctagtcaaactgggtctagtagaagtgaagctagattttggcttatgaataggcttaagtcggggggctgaatggtgaattgtagctgaataaaaacctagtatactggagaagttaaatgtctataatgggtactttaaggttgttagttatgaaattaagctctattgctagtaagagacctagggtggttacacctagggctgtgagctttaggtggagtggtatagttgtttggggggatgaagtagggataatactgttagtgatgaggaatccggcgaagatactgccgattgctaggtgctgaactgagttaattcggagaggattatcattaataacaatcagaattgtaaaacaaggttgtcctattacagcacctaaggttataaagtaagcacaagtaaatacataaaaacgttaggtcaacgtgtagctcatgaggtggcaagaaatgggccacattttctaccccagaaaatctcacgacaacctttatgaaatctaagggctcaaggaggatttagcagtaaaccaagagtagagtgcttggttgaggttgaataaggccacgaagcacgcacacactgcctgtcaccctccgcaaatatcattctagaaatattatttaaattctctatacatgaatagaggagataagtcgtaatatggtaagtgtactggaaagtgctcttggacaaacaaagtgtcgcttaacccaaagcatccagcttacacccggaagatttcatcacaacctggtcactttgagccaaccctagccccaaacctcactaaaaatactattaaaccatcgtaatcaaaccatttaccttagacaaaagaataggcaatagaaattcttatcttggcacaatagatacagtaccgtaagggaaagatgaaagaactgagcaaagacaagcccttataccttctgcataaagtattaagtagaaataactttacacagagatagccaagtcccccgaaaccaaatgagctatgcaagaatggctgaaagagcgtactcacctacgtggcaaaatagtgggaagattcatgagtagtggtgataagcctatcaagcctgctgatagctggttgtccaagatagaatcttagttcagctttaaacttacccacagaattacttaatgtccctgtaagtttaactgttaatctaaagagggacagctctttagaccctaggaaccaaccttcctacagagagtacaaaataacatcgccatagttggcccaaaagcagccaacaattaagaaagtgttcaagctcaacatccaagtatcttaaattctaatcactctacggaactcctaacattacactggtctaatctattatttaatagaagcaataatgttaatataaataacatgaaaatattctccaccgcataagcttacataagactggaataacccactgactgacagttaacagctagatattttacaataagcatcctattatttatactgttaatccaacacaggcatgctctaaggaaatattacaaaaagtaaaaggaactcggcaaatcttaccccacctgtttaccaaaaacatcacctctagcattaccagtattagaggcactgcctgcccagtgacatatgttcaacgaccaccatatcctgaccttgcaaaggtaacataatcacttgttccctaaatagggacttagaagaatggccacatgagggttcagctgtcatgagggttcagctgtctcttacgtttaatcagtagaatctgacctattggtgaagaggagcttataagcaaataagatgagaagaccccatggcactttaattcattaatgcaaataaaaactcaaaaagcctataggccttaacctactatctctgcattaaaaattttggttggggtgacctcatagcatattcaacctccgaacaacctaaactaagaccacagtagtctaagcgagttaatacacattgacccaataatttgatcaacagaacaagttaccctagggataacagtgcaatcctattctatcatatcaataatagggtttacgacctcgatgttggatcaggacatcctaatggtgtagccgctattaagggttcatttattcaatgattaaagtcctatgtgatctgatttcagaccagagtaatccaggttggtttctatctgtttaacatttctcctagtatgaaaggacaagagaaatacggcccacttcataaagtgccctccccccataaatgatgctatctcaatctaggaaatcaccacacacccaagaacagggtttcttaagatggcggagcctggcaatagcataaaacgtaaaactttacaatcaaaggttcaactccccttcttaacaatatgcctataattaaccttttcctacttatattcccactctaattgctatagcattccttacacttaacagttacgcaaaggacctgataccgtaggcccctgtggactgcttcaaccatttgctgacccaataaaacttttcaccagagaacccttacgaccctcaacgtctactgttaccctttatatcattgcctccaaccctggccctttctatcaccctcctcttctggactccccttcctataccccatcccctaattaattttaatataggcctcttatttattctagccacatcaagcctagcagtctattccattctatgatcaggataagcatccaattcaaattatgtactgatcggcacactacgagctgtggcccagacaatttcatatgaagtcaccctagccattatcctgctatcactactactgctaagtggctcaacttatatgcatgcatcacaatgccagaattactctgaccgctcctaccatcatgacccttagccatattatgatttatttccacactagcaaaaactaaccgagccccttttgacttaacagaaagagaatcagaactagtttcaggcttcaatgtcgaatatgctgcaagttcatttgccctcttctttatagcagaatatatgaatattattgtataaatgccctgactactactatttttctaggagtactacacactatgtattcaccagaactctgtaccataaatttcattaccaagaccctccttttaaccaccgtttttatgaatccgaacagcatacctccaattccactacaaccaactcatataccttttatgaaaaaatttcctaccacttacattagcattctgcatatatctcaatgcctttcctaatttccagcattccaccccaaacataggaaatatgtctgacaaaagaattactttgatagagtaaacaagagaggttaaaatcctcttatttctggaactataggaattgaacctatccctgagactccaaaattctccatgctacctattaaaccatatcctaaagtaagttcagctaaataagctattgggcccattctcctgaaaatgttggttatacccttcccatactaattaatccattagctcaacttattatctctcttactattttcacaggaaccctcatcacaatgctacgctcacactgatttcttatctgaacaggcctaggaataaatatagtagttcttacccccatcttgattaaaaaaacaaatctccactctacagaagcagccaccaaatattttcttacacaagcaactgcatctataattctcatgatgggtatccttttcaacaacccgtcctccgggcaatggacaataataaacactactaatcaattttcatccttaataataacagccctagtaataaagctagaaatagccccctttcacttccgagtcccagaagtaacccagggaacttctctaatgtctggcatacttctcctcacatgacaaaaactagcccctatctcaattatatttcaaattttcccatcaataaacacgaccagtctcctatctatcacaatcctatccattaacgtaagcggttgaggaggacttaatcaaacacaattctgcaaaatcttaacctactcctcaattactcatataggttgaatgatcccagtactaacttataatccaaacgttaccattataaatctgattgtttaccttattttaacaactaccacatttctagcacttagcctaagtataagcactacaaccctgtcactgtctcacacttgaaacaaattaacatgattaacacctatagtttcactaattctactatccctaggagctttacctccattaacaggatttctgcctgaatgagtcatcattcaagaattttcaaaaaacaatagtcttattaccccaaccattatagctatcataacactactcaacctgtagttttatatatgcctaatttactccatctcaatgacaatattccccacatccaataatacgaaaataaaatgacaattcaaaaacacaaaacccatattactcctccctccacttatttcttctaccttcctcttacccatctctccactgattctagttataacttagaaatttaggttaaataagaccagggaccttcaaaacccttagtaaatgaattatacttaatttctgtaacaaacccaaggactgcaaaactctattctgcatcagttgaacgcaaatcaaccactttaattaagctaagtccttgctagatcggtggaattcaaacccacaaaaatttagttaacagctaaataccctaatcaactggcttcaatctacttctccctccatgtggggggagggtggtaggccggagaagccctggcagcattgaagctgctcctttgaatttgcaattcaacataaaaaattacctcagggctggtaaaaagaggtcttgacctctgtctttagatttacagtccaatgcttactcagccattttacccttttttccacttatgttcatcaattgttgattgttttcaaccaatcacaaagctatcggaacactatacctgctgttcggcgcatgagtggggatagtgggtacctccttaagccttctaatttgagcagaattaggtcaaccaggaactctgctaggagatgaccagatctataatgttattgttaccgcccacgaatttgtcataatcttctttatggtcatatcaattataattgggggtttcggcaactaactagtccctctgataattgctgcccctgatatggcatttccacggataaataataatgagctttttacttctcccccactctttcctactcctacttgcatcctcaatagaagccggtgctggaactggctgaacagtttatccccctttagctgaaaacctaacacatgcaggatcctttgtgggtcttaccatcttctcacttcacttggcaggtattctattttaggagccattaactttattactacaattattaacaaaaagcccccagccatatcccaatatcaaacaccccttttcgtccaaccattcctcattacagcaatcctactcctttctctctcagtcctagccgctggcattaccacaatattaactgaccgtaacctcaacactactttttgaccctgctggtgggggtgatcctatcttatatcaacatttattctgattctttggtcaccctgaagtttatatccttattctatcaggctttgggatgatctcccatgtcgtgacgtattactctggaaaaaaggagccatttgggtatatgggcatagtatgagccataatatctattggcttcttagggtttattgtatgagcacaccatatatttacagtaggaacagacatagacacagacacatgagcatacttcacctccgctaccataattactgctatgcctactggcatcaaggtctttagctgattagctacactgcgtggtggtaacatcaaatgatctcccgcaatgttctgagccctaggattcatctttcttttcacagtaggaggtctaattggcattgtactagctaattcatcactagatattattttacatgatacatactatgttgtagctcatttccactacgtcctatcaccaggagcggtgttcgccatcataggaggctttaccactggttcccccattctcaggttatatgcttaatcagacctacgctaaaattcacttcaccattatattcataggtgttaatttaacctttttcccacagcacttccttggcctatccggtatgccgcaacgttattccgattatcctgatgcatacaccgcatgaaatattatctcatccttaggctcatttatctcattagcagcagttatgctaacaatttttataatctgagaagcctttgtttcgaaaagaaaaactataacaattgaacaaccatctagtaatttagagtgactttatggctgtccaccaccttaccacacatttgaagagccaacctacattaaacccttaaatgaaaaagaaaggaattaacttccagaaactggtttcaagccaatcaaaaacctctgtgactttctcgataagatattagcaaattcattacgtaactttgtcaaagttaagttataggctaaatcctatatgtcttaatggctcatccagttcaattaggccttcaagacgctacatcccctatcatagaagaaccgctcactttccgtgaccacgttcttataattattttcctaattagttcctggttctatacattatttccgtaatactcacaacaaaattaactcatattagcaccacagatgcccaagaaattgagactgtttgaactatcttacctgccattatcttaattttaaggcctctcatccctacgtattctgtataaaacagatgaagttaataatccttcccttactgtcaaagcaattggtcatcaatgatattgaagctatgaatatatagactatgaagaattaagcttcaattccttttttttttttttgagacagagtctcgctctgtcgcccaggctgcagtgcagtggtgtgatctcagctcactgcaagctctgcctcccgggttcacgccattctcctgcctcagcctcccgagtagctgggactacaggcgaccgccaccatgcctgggtaatttttttgtatttttagtagagacggggtttcaccatgttagccaggatggtcttcatctcctgacgttgtgttccacccacttcagcctcccaaagtgctgggattacaggcgtgtgagccactgcgcccggcttaagcttcaattcttatataaccccaacaccagacttaaaaccaggagaacttcgactccttgaagttgataaccgaacaattctcccaacagaaatacccatccatatattaatctcatctgaagacatcctgcactcatgaactatccccttattaggcctcaaaacagatgcaatccccagatgcttaaatcaaactaccttaaccactgggcgaccaggtctttactatggacagtgctcagaaatttgtgaatctaaccagttttatacctattgtcctagaactaatcctcttaaaatatttcaaaacctgatccacatctacactaaaatatcactgtaaagctattcagcatttaccttttaagttaaagattgacggagtctacacctctctgcagtgaatgcctcaactagatacttccacatgatccattattatcctgtcaataatcataactttattctccattattcagttaaaattattaaatttcatttatattatccctacaccaaaaataatcaaaacacaaaaacacaaggcttcctgagaattaaaatgaacgaaatctattcatctcttttgctacccctacaattctaggcctaccagcagtagtattaatcattctgtttcccactgtttccaacctctagtcatcaaattagtaaccgattattttctattcaacgatgattaatccaacctgcactaaaacagataataattacccataacattaaaggacaaacctgatcccttataataatatccctaattatcttcactgcctcaaccaacctccttgggcttctaccccattcatttacaccaactatccaattatcaataaacctgggtatagcaatccccctgtgagcaggcgcagtaattacagtcttctgctttaaaacgaaaaactccttggctggctttttaccacaaggcacacctatgccacttatccctatactagtaatcattgaaaccattagcctatttattcaaccaatagcattagctgtgcaattaacagccaacattatagtcagtcatctactaatacatttaattgcaggagacacactagtactattagctattagttttcccacagcttcagttgcttttattattctaatcctactgactattctcaaattcgccatagaccttattcaggcttatgtcttcacactactagtaagcctttatctatatgacaacacataatgacccaccaaacacatgcttgccatatagtcaaacccagcccctgaccactaacagaagctctctcagctctactaataacatctggcctggccatgtgatttcactttaattctactactcttttaaccctaggcctattaatcaacacactaactgtataccaatgatgatgtgatattatctgagaaagtaaatttcaaggccaccatacaacagttgtccaaaaaggcctccaatatggaataattctatttattatctgagaagtattcttctttgctggtttcttctgggcattctatcactctagtctagccccaatgccagaattaggaggacactgaccccccaacaggcatttttcccctcaaacgcttagaagtacctttctgaatacatctgtattatttgcatcaggagtttcagttacttcggctcatcacagcctgatagaaggaaatcgaaagcaaataattctagcactatccatcacgattaccttaggtatttacttcaccctcctacaaatctcagtactttgaggccccttttactatctctgatgggatctatggctcaacattctttacagccacaggctttcatggatttcatgttattactggatcaacatttctcactatctgcttcctccgccaattaaaatatcactttacaagatgtctgaataggaatagctccagtctgcagctcccagcatgatcgacgcagaagatggtgatttccgcatttccaactgaggtacctggttcatctcatcgggactggttggacagggggtgcagcccacagagggcaagttgaagcagggcggggcatcacctcacccaggaagcacaaggggtcaggggatttccctttcccagccaagggaagccatgacagactgtacctggaaaatcaggacacttttgcccaaatactgtgcttttccaacagtcttaccaaatggcacaccaggagattatatcccatgtctggcttggcaggtcccacacccacggagccctgctcactgctagcacagcagcctaagatccacccgtgaggcagcagcctggcaggcggaggggcgtccgccattgctgaggcttgagtaggtaaacaaagtggccagggaagctcgaactgggtggagcccaccacagctctgcaaggcctgctgcctttgtagaccacacctctgggggcagggcatagctgaaaaggcagcagaaacttctgcagacttaaacgtccctgtctgacagctctgaagagagcagtgtttctaccagcatggtgtttgagctctgacaatggacagactgcctcaggtggatccctgatgcttctgtagcctaagtgggagacacctcccagtagaggccaactgacacctcatacaggtgggtgcctgtctgggacgaagcttccagaggaaggatcaggcagcaacattggctgttctgcaatatttgctgttctgcagcctccactgcagataccgaggcaaacagagtctggagtggacctccagcaaactccaagagacctgcagctgagggacctgactgttagaaagaaaactaacaaacagaaaggaatagcatcaacatcaacaaaaagggcatccacaccaaaaccccatctgtaggttaccagcaccaaagaccaaaagtagataaaaccacaaagatggggagaaaccagagcagaaaagctgaaaattctaaaaaccagagggcctcttctcctccaaaggattgcagctccttgccagctggatggagaatgactttgacgagctgacagaagtaggcttcagaaggttggtaataacaaacttctccaagctaaaggaggatgttcaaacccatcgcaaggaagctaaaaaccttgaaaaaagattagaccaatggctaactacaataaacagtgtagagaagaccttaaatgacctgatggagctgaaaaccatggcatgagaactacaggacgcatgcacaagcttcactagccgacttgatcaagtggaagaaagggtatcagtgattgaagatcaaattaatgaaataaagcgagaggagaagtttagagaaaaaagagtaaaaagcaacaagataaagcctacaagaaatacaggactatgtgaaaagaccaaatctacatttgattgttgtacctgaaagtgacggggagaatggaaccaagctggaaaacactcttcaggatattatccaggagaacttccccgacctaccaaggcaggccaacattcaaattcaggaaatacagagaactccacaaagatactcctcgagaagagcaaccccaagacacgtaattgtcatattcaccaaggttgaaatgaaggaaaaaaatgttaagggcagccagagagaaatgtcgggttgcccacaaagggaagcccatcagactaacagcggatctctcagcagaaactctacaagccagaagagagtggaggccaatattcaacattcttagagaaaaagacttttcaacccagaatttcatatccagccacactaagcttcataagtgaaggagaaataaaatcctttacagacaagcaaatgctgagagattttgtcattaccaggcctgccttacaagatctcctgaaggaagcactaaacatggaaaggaacaaccagtagcagccactgcaaaaacataccaaattgtaaagaccatcgatgataggaagaaacagcatcaactaacgggcaaaataaccagctaacatcataataacaggttcaaattcacacataacaatattaaccttaaatgtaaatgggatgaatgccccaattaaaaaacacaaactggcaaattggataaagattgaagacccatcactgtgctgtattcaggagaccaatctcatgtgcagagaaacacatgggctcaaaataaagggatggaggaagatctaccaagcaaagggaaagcaaaaaaaaaaaaaaaaaaaaaaaaaaaaaaaaaagcaggagttgcaatcccggtctctgaaaaaaaagactttaagccaacaaagatcaaaagagacaaaaaaggccattacataatggtaaaaggatcaactgggcaagaagagctaactatactaaatatataggtacccaatacagcagcaccaagattcataaagcaagtccttagagacctataaagagacttagactcccacacaataataatgggagactttaacacctctctgtcaataatagacagatcaatgagacagaaggttaacaaggatatccaggacatgaactcagctctgcaccatgtgaacctaatagacatctacagaaccctccaccccaaatcaacagaatatacattcttctcagcacgacatcacacttattccaaaatagaccacatagaagtaaagcacttctcaccaaacgtaaaagaacagatatcacaacaaactggctctcagagcacagtgcaatcaaattagaactcaggactaagaaactcactcaaaaccgcacaacttcatggaaattgaacaacctgctcctgaatgactactgggtaaataatgaaatgaagacagatataaagatgttctttgaaaccaacgagaacaaagacacagcataccagaatctctgggacatatttaaggcagtgtgtagagggaaatttatagcactaaatgcccacaagagaaagcaggaaagagctaaaatcgacaccttaacatcacaattaaaagaactacagaagcaagagcaaacaaattcaaaagctagcagaaggcaagaaataactaagatcagagcagaactgaaggagatagagacacaactcttcaaaaaatcaatgaatccaggagctggtttttcaaaaagatcaacaaaatagatacactgctagcaagactaataaagaagaaaagagagaagaatcaaatagagggaataaaaaatggtaaaggggatatcaccaccgatcccacagaaatacaaactaccatcagagaatactattaacacctctacacaaataaactagaaaatctagaagaaatggataaattcctggacacatacaccctcccaagactaaaccaggaagaagttgaatctctgaatagaccaataacaggctctgaaattgaggcaataatagcctaccaaccaaaaaaagtccaggaccagatggactcacagccgaattctcctagaggtacaaagaggagctgataccattccttctgaaactattccaatcaatggaaaaagagggaatcctccctaactcattttatgaggccagcatcagcccgataccaaagcctagcagagacaccacaaaaaaataattttagaccaatatccctgatgaacgtcgatgtgaaaatcctcaataaaatactggcaaacccaatccagcagcacatccaaaagcttatcaaccacgatcaagtcggcttcatccctaggatgcaaggctggttcaacatttgcaaatcaataaacgtaatccataacataaacagaaccaatgacaaaaaccacatgattatttcaatagatgcacaaaaggtctttgacaaaattctacagcccttcatgccaaaaactctcaataaactaggtattgatggaatgtatctcaaaataataagagctgtttatgacaaactcacagccaatatcatactgaatgggcaaaaactggaagcattccctttgaaaactggcaaaagacaaggatgccctctgtcaccattcctattcaacactgtgttagaagttctggccagggcaatcaggcaagagaaagaaataaagggtattcaattaggaaaagaggaagtcaaattgtccctgtttgcagatgacacgactgtatatttagaaaacttggtcatctcagccccaaatctccttaggctggtaagcaacttcagcaaagtctcaggatacaaaatcaatgtgcaaaaatcacaagcattcctatacacccataacagacaaacatacagccaaatcatgagtgaactattcacaattgctacaaagagaataaaatacctgggaatccaacttacaagagatgcgaaggacctctggacctcttcaaggaaaactacaaaccactgctcaatgaaatacaagaggacacaaacaaatggaagaacattccatgctcatggataggaagaatcaatatcgtgaaaatggcgatactgcccaaagtaatttatagattcaatgccatccccatcaagctaccaatgacttttttcatagaactggaaacaactactttcaagttcatatggaaccaaaaaagagcctgcattgccaagaccatcctaagccaaaagaacaaagctggaggcatcacactacgtaacttcaaactatactacaaggctaccgtaaccaaaacaacatggtactgctacccaaacagagatagaccaatggaacagaacagaggcctcagaaataacaccacacatctacaaccatctgatctttgacaaacctgacaaaaacaagaaatgggaaaaggattccttatttaataaatggtgctgggaaaactggctagccatatgtagaaagctgaaactggatcccttccttacaccttatagaaaaattaattcaagatggattaaagacttaaatgttagacttaaaaccataaaagccctagaagaaagcctaggcaataccattcaggacataggtgtgggcaaggacttcatgatgaaaacgccagaaacaaaggcaaccaaagccaaaacagacagatgggatctaattcaactaaacagctgcacagcaaaacaaactaccattagagtggacaggcaacctacagaatgggagaaaatttttgcaatctacccatcagacaaagggctaatatccaaaatctacaaagaaatttacaagaaaaaaacaaccccatcaaaaagtgggcaaaggatatgaacagacacttctcaaaagaaggcatttatgcagccaacagacatataaaaaatgcttatcatcactggtcatcagagaaatggaaatcaaaaccacaatgagataccatctcatgccagttagaatggtgatcattaaaaagacaggaaacaacagatgctggagaagatgtggcgaaataggaacactttcacactgttggtgggagtagtgtaaactagttcaaccactgcagaagacagtgtggcgactcctcaaggatctagaactagaaataccatttgacccagccatcccattactgggtatacacccaaaggattataaatcatgctgctataaagacacatgcccatgtatgtttactgtggcactattcacaatagcaaagacttggaaccaacccaaatgcccatcaatgatagactggataagaaaatatgccacaaatatcccaaggaatactatgcagccataaacaagggtgagttcatgtcctttgcagggacatggatgaagctggaaaccatcattctcagcaaactagcgcaaggacagaaaagcaaacactgcatgttctcactcataggtgggagttgaacaatgagaacacttggacacatggcagggaacatcacacaaaggggcccgggggagggatagcattaggagaaatacctaatgtaaatgacgagttaatgggtgctgcaaatcaacatggcacatgtatatctatgtaacaaacctgcacattgtgcacatgtaccctagaacttaaagtataataaaaatatatatacatcactttacatccaaccagcactttggctttgaagccactgcctgatgttgacactttgtagatgtagtatgactattcttatatgtctctatctactgatgaggatcctactcttttagtataaagagtaccattgacttccaatcaactagtttcgataatatctgaaagatattaaataacctgacactagccttagtaaccgacaccttactggccctactactactactaattacatttttacttccacaaattaatatttatatagataaatccagcccctatgaaggcagatttgacccaataacctccaactgcctccccttttccataaaattcttcctagtagccaacacatttctcctcttagacttagaaatcgctctaatactacccctgccatgagctattcaaacaaattacctaacaacaataatcaccacagcccttatactagttatcattttaatcctaggcttaatttacaaaagaactcaaaaagggttagattgaattgaattggtaaatagtttaagtcaaaagaaatgatttcgattcattagattataataaaccatatttaccaaatgccctctatttacatcaacattatattaccatataccatatcactactggtaaaattaatctatcaaacccacctaatatcatccctatgtgcctagaaggcataatactgtcaatatttatcataattacccttataactttaaatatacattttactctagcatctataatacccattatcctcctagtatttgctgcctgtgaagccgcagtgggccttgccttattagtttcaatctccaacacatacggcctagattacacacaaaatctaaatttacttcagtgctaaaaattattccgacaattatgctgttaccaataatatgattctctaaaaattctataatctgaattaacatgaccatccacagcctacttatcagcctcatcaccctattgttttttaaccaattcaacagtaactcatccaacttctcactagttttctcttctgatctgctgatgtcacccctcctaattttaacagcctattaccttttataatcctagcaagccaatattaactgttcaatgaatcacccccacaaaaaagctctatatttctatattgatttccctgcagattttttaaaattatagcattcacagccacagaactaattatattttatattttctttgaagccacactaattcctaccctaattattattatcacccgctgagggaaccaaccagaacgcctcaatgcaagctcatatttcctattgtacacactagtagggtcccttcctctacttgttacacttgtctacactttaaatacttcagattctctaaatatgctagtaatgatatttactgaccaagaactgttagcctccttatccaataatcttatatgactagcatgtattatggcctttatagtaaaaataactctattcggacttcacctgtgactcccaaaagcccatgtagaagcccctattgccggctcaacagtacttgcagcggtactcctaaaactaggcggctgcggtataatacggcttacccttatcctcagccccctaacagaatatatagcctaccccttcctcacactatccctatgagggatagttatgacaagctccatttgtctacaaaccgatgtaaaatcagttattgcctactcctctgtaagccatataccacttgtcatcatagctctcctaatccaaaccccttgaagctttacaggtgccgtcacccttataattacccatggagtcacttcatccctgttattctgcctagcaaattccaactacgagtgagtccaaaacggaatcatatacttacctgaggccttcaaatactcctcccactgatatagcctcatgatgacttctagcaaatctcactaatcttgccttacccctaccattaatctagtaagggaactctctgtgatcatggcttcattctcctgatcaaacatcactattatgcttacaggacttaatatactaattacaaccctctactccctacatgtaccaatcacaacacaatgagggacacttacatattacattaacagttaaaccttcctttacacgagaaaatacattaatatttatacatgttacacctattcttctattatcctaaatcctaaaattattatgggctttacatgctgtagctatagtttaaccaaaacattaaattgtggatctaataatagaagcctgcaacttcttatctaccaagaaagtatgcaagaactgctaactcatgcccccatgcctaacaatatggctttctcaacttttaaaggattggagtcatccgttggccttaggaaccaaaaacattggtgcaactccaaagaaaagtaacaaatatgtatttttccactactataatagccctaatcgccttaatcacaccaattattacgttagtcaacccctgcaaaagaagattcatacccaaattacataaaaatagccatcacatgcgccttcaccattagcctcatcccaacgtttatatatacagaccaagaagtcattatctcaaactgacattgaatgacaatcccaactcttaaactctcactaagctttagactacttctccataatatttattctagtagcactatttgttacctgtagaattctcaatatgatatataaactcagaccctaacattaatcaatttttcaaatattttcctcatcacagtattcttccaatattccaccaacaaactctttcaactctttatcggatgagaaggtataggaatcatgtctttcttactaactggctgacaatatggccgagcagatgctaatacagcagccctccaagcagtcctgcacaatcgcatcggcgacattggttttattttagttatagcatggttcctcttttcctccaacacatgagagattcaacaagcattcattctaaaccctacctctaatccccttccattaattcgccttctcttagcagcagcaggaaagtcagctaaattcggcctccatccctgacttccatccgccatagaaggcccaaccccagcctcagccctgctccactccagcactatagttgtagcaggagttttcctgctcatccgcttctaccctttaatagaaaataacctctgaacccaaacctttacattatctccaggggctgttaccaccttatttacagcaatctgcgctctaacacaaaatgatatttaaaaaatcatagcattctccacctcaagtcagctgggccttacgatagtcacaattggcattaatcagccacatctagcattccttcacatgtgcacccacaccttttttaaagctatattatttatatgctcaggctccatcatccacaatctcaatgatgaacaagatatttgaaaaataggactattcaagactttacccttcacttcctcttcccttattattggtagccttgcacttacagatatgcctttcttcacaggcttttactctaaagaccttattatcgaaaccacaaatactgtcatataccaacgcctgagccctttctattactcttactgccacctccttaactgctggctatagtacccgtgttattttctttgctctgcggactggccatgcaggagtggtaagggcccgggccacgcgcgacgcctgggggccctgctgcatcgcccgtttgttcggggaaggtgggggggacgcttcatgccgccgcgcccagcagggtttccatgtctgagatgcccgctctggccccaagagaatgaaccagccgcagaggatggcatccgtggacacggacaaggagctcagtaacctggacttcagcatgatgttcccgctgcccgttgccaacgggaagggccggcccgcctccctggccggggcgcaattcagaggttcaggtcttgagaactggcccagctcaggctcctggggcagcggcgaccagaacagctcctcctttgaccccagctggacgttcagcgaaggcgctcaacttgctgagtcgcacggcagccactctccattcacattcctgggaccgggactcggaggcaagagcagctagcgcgggcctattcctcctttggtagagacgcaggcgtgcgcagcctgactcaggctggcttcctgccgggcaagctggccctcagcagccccggacccctgtccccctcaggcatgaaggggacctcccggtactacccctcctacgccagcagctctggcggacagaggcggacagcggcctggacacgcagcccacgaaggtcgggaaggtcccgcctggtcttccatcctcggcgtacctgcccagctcaggtgaggagtacggtagggatgccgccgcctatccatccgccaagacgcccagcagcgcctgtcccgcccccttctacatggcagatggcagcctgcacccctaagccgagctctggagttccctgggccaggtgggctttggccccatgctgggcgggggctcatgcccctcgtccctcccgcccagcagcggccctgtgggcagtggcggaggcagcagcacgtttggcggcctgcaccagcacgagcgcgtgggctaccggctgcacggaggagaagtgaacggtgggcttccggctgcatccaccttctccttggcccccggagccacgtaggcggcgtctccagccacacgcctgtcggcggggccgacaacctcctgggctcccgagggaccacagccagcagctctggggacgccctcgggaaggcctggcctcaatctactctccggatcactcaagcaataacttgtggtccagcccctccaccgccgtgggctccccccagggcctgggagggacgtcgcactagcctggagcaggagtccctggtgccttatcacccagctacgacgggggtctccacggcctggagagtaagatagaagaccacctacctgaacgagggcatccacgtgctctgcagccacgccatgggcacggctagcaacgtgcacacgctgctacccggccaccgggcgctggccttgggcttcgccggccccatgctgctggtgggggcagcacgcaggcctggttggaggcgaacaccctgaggacggccctgcgggcagcgccagcctcatgcacatccatgttgccctctccagctagccaggcgccctccccgacctctcttggccttccgactcctgcagtgggctagggcgagcaggccactggggaaatcaagcgggaggaggaggatgaggagaacacgtcggcggctgaccactcaagaggagaagaaggagctgaaggacccccgggaccggaccagcccagacaaggacgaggaggaagatgaccttttccccccagagcagaaggccgagtgggagaagcaggtggccaataacgccagggagcggctgcgggtcccttaagagggctcttaaggagctggggcgcatgtggcaactgcacctcaacagcgagaagccccagaccaaactccttatcctgcaccaggccgtctcggtcatcctgaatttggagcagcaagtgcgagagcggaacctgaatcccaaaacagcctgtttgaaacggcgagaagagaaggtgtcgcgcgtgttcggaggcccccagatggtgctttcagctgcccacctgggcttgagtgaagcccacaaccccgctgggcacgtgtgaaaggtacgcctccgtgggacgagccacccgccctcagccccgtgggctgggcccagaacgcccacttgaggccctgggcttcatccacatccacacctcacacaactgttgtcagcattgagccaacaccgacctgatgaggctcagagtgatgggggcaaggaaggtgagtgatgggggtgaggaaggtgacgctgggtccaggagctccctgggaccccggctcacccctcactgccctcgctccccctgcccccgtatctcagccaccatgtcaccctgtgacctgccccatggaccctgaaactgcatcttggccctgttgtctgggctggcaggagcttttttttttttttttttttttttttttccagtaaacaaaacctgaatgcaagcaacaaaacatacactttgtcagaaaagaaaaaaatgccttaactataaaatgtggagaaatcgtaacatatcacttgagggagatgctgtggaaacttggcttattcttcaaaagccagcagcaaattgtgcctaagcgtaattttttttaaggaaaataaaaagaacattagttatttaaaaaaaaaaaaaaaaaaaaaaaaacccggactgaccttggccaggctggatcagactggcctagagtagacttcagagggtgactcccctggtgggctggtctcagctgatcttgactgtcccgcctccacacagggcccatccatcttccccttgatcccctgctgcaaagacattgcctctgatgccacctccatgaacctgggctgcctggccacaggctacttcctgaagtcagtgactgtgacctgggacacaggctccctcaacaggagcgctgggaccttcccagccaccaccctcacgccctctggccattacgccatcaccagccagctgactgcctcgggtgcgtgggccaaacgctcacctgcagcgtggcacacactctgtggtccgcagaccaggtcagtaccttcagcatctactccagggacttcaccctccccaccgtgaagatcttacagtcctcctgtgatggcagtggacacttacccccgaccatccagttcctgtgcctcatctctgggtacacccaggtgccatcagcatcacctggctggaggatgggcaggtcgtggatgtgaactggtccatcgcctctcccatactggaggatgagctggcctccacacaaagcaagctcaccctcacccagaagcgctggctgcccgaccacacctacacctgccaggtcacctatcaaggtaacacctttgaggacagtgccaagaagtgtgcagattctaacccgcaaggggtgagcacctacctgagccggtccagccccttctacctgttcatccgcaagttgcccacaatcacctgtctggtggtggacctggcacccagcaaggagaacgtgaagctgacttggtcccaggccagtgggaagtctgtggctcaggtcatcctaaggcaagagaagcagtgcaatggcacgttcaccatcacgtccaccctgctggtgggcaccagagactggatcaagggggagacctaccagtgcagggtgacccacacccacctgcagtccacgaccaagatcagcggcccatgtgctcccccacaggtctacgtgtttgcaacgctagaagagccgaggaaccaggacaagcgcaccctcacctgcctgatccagaacttctggcccaaggacatcttggtgcagtggctgtacaacgaggtgcagctcccggacacttggcacagcatgacgcagccccgcaaaaccaagggctctggcgtcttagtcttcagctgcctggaggttaccagggctgaatgggaacagaaaaacgagttcatctgctctgtggtccatgagacagcgactggctcacagaccgtcaagtaactgttgtctgtaaatcccattaaatgtcctcctgccttcctccccactagggctctgtccagctgtgtggtgggaagggctggccagaccttctgtccactgttgcaatgaccccaggaagccacccccaataaacagtgcctgctcagaaaacaaacaaacaaacaaacaaacataaaaaccctagaggaaaacctaggcaataccattcaggacataggcatgggcaaggacttcatgactaaaacaccaaaagcaatggcaacaaaagccaaaatagacagatgggatctaattaaactaaacagctgcatagcaaaagaaactgatcagagtgaacaggctacctacagaatgggaaaaattttttgcaatctagccacctgacaaaaggctaatatcaagaatctacaaagaacttaaacaagttcacaagaaaaaaacaaccccatcaaaaagtgggtaaaggatatgaacagacacttctcaaaagaagacatttatgtggccaacaaacatatgaaaaaaagctcatcatcactggtcatcagagaaatgcaaatcaaaaccagagtgaggtaccatctcatgccagttagaatggcgatcattaaaaagtcaggcaacaacagatgctgaagaggatgtggaaaaacaggaatgcttttacattgttgatgggagtgtaaattagttcaaccattgtggaagacagtgtggcaattcctccaggatccagagttagaaataccatttcactgagcaattccattactgggtatatacccaaaggattataaatcattctactataaagacacatgcacatgtatgtttattgtggcacttttcacaatagcaaagacttggaaccaacccaaatgcccatcaatgatagactggataaagaaaatgtgacacatatacaccatggaatactatgcagccataaacaaggatgagttcatgtcctttgcagggacaaagatgaagctagaaaccataattctcagcaaacacaggaacagaaaaccatacaccacttgttctcgctgataagtgggagttgaacaatgacaacatatggacacagggaggggaacatcacacaccagggcctgttgttgggtggagggctaggggagggatagctttaagagaaatacctaatgtagttgatgggttgatgggtgcagcaaaccaccatgacacgtgtatacctacgttaacaaacctgcaccttctgcacatgtatcccaaaacttaaagtataataaaatttaaaaaaaaaacagtgaacatttattgtaggcttacattgggctaaatgcattttatggataatctcatttaatcctcataacaacccttggagaacatgtatgattattatctctattttaagcatggagaactgaatagcttacccaaggtggcatgactagtaaatcactggaccaggatttaaacccaaaaagtctgatcccagagttcatgcttataagccttcctaaccatgataatgctttaatctggcattaattgttctctaatttgggtaggtttgaaatttttcataataaatattaaaaatactttttgaggaaatgtcgtcatgataaacattagaactgcgttcatctaattacttttagggtatgagtgaaactaaaaagtaagactcatctaaaaataatcatctgttttggccatatccccagtgatacatgaatttaattgtttttattgttttcagaatgaaaaattaaagaggttaaataaaattagctggcaatcaaaaaatattagttatatgaagattcagagatttggttatacttaatgaatacaagctaataaatatttattaagactctactgtgctccaaatactatacagggaggtagggatatgaagataggcttagcatcagaaaaggactgtcccttagtagaaaggctgaactaaaaggaaaagtttgacgtgataggcaaattcaactgacaggtccactacccatagtcccttcaagagctcataattaggaaaagtcatatgtataatatggcactttcaataattaagtgcaataagtgtaagtgcaataattaaggtactgggaaaacataacagtacaaataattcagctgaagatttatgtaagataactaagatgacatttcaacgattggttgaattgacctctccctcatgaatgggattaaggcccttataagaggcttcatgcagcatttggctcctcttgcctttccactttcatccatgtgaggacacggcattcctctcctctaaaagatgtggcaacaaggctccccttggaagcagagagcagccctcaccacacacctgaacctgccagcacctttatcatggactcccaacctccagaagtatgagaaataaatttctgttctttataaattatccattgtcaggtactctgttatagcagcatacatggacgcccagtacatcatgttaatgagttcagaccttctttagtagacagtgcgtaaggtgggaaattagaggctttatccaggggaataacatggtgagattcatattttagaaagatagctctacttttgttatagaacagcagttctgaaagtgtggggactttagggtgtctgtgaagtaaaaaatattttcataataatggatgttatttgctcttttcactcattttttcataagtatagttttccagaggcaataagatatgttttctatttaaccaaacattgaagagacttgcaaaaatgtaaaacaatgtgactcttatcaaagtttattttggaaatagttgttttccataaaatacattacttatgttaacaggtaatggttttatcttaaataaattaataaatatttttatattttattagctttaatatttaatatggtaaatactggtagatataactcacagaaacaaaagttttttggcaacctcagtaatttttaagagtatacgaggaagcctgagatcaaaagctttgagaactactgacagaggggacgttgtattaatgagaggctaatagtagagaggcagctaattagattttatgaggatctaggccactggttttcaaaccttttaagtatatatgctcactaaaagaatttagaaaaaccacatcctcttacacatttttaaattgatagctaatttttttctttgtaagtagttataatgtattttctaaagtactgtaaatattgacatttaaataacagctatgtcaatcctttaaatgtgtccaactgaatctaaatagtgcttgcagtgagcggagacctcgccactgcactccagcctgggcgacagagcgagactccatctcaaacaaacaaataaatagtgcagcaatttgatacccacttatcacccacttaaaaagattatatgaatagacttttatttttttgtacaaactttgtatcattcctttttctctttaaaatagtattcccacttcccttctcattccaaattttgcataatatgttacactttgtatttggataatcttatgatcacctattttctttgtaaccaagatatgtatataagtaagttgaaattaattaaaaattttcctgtgaccaacaaacttgtaactattcacatttttcttctgggttatcattgaagttactaggatacagttttccaaagcaatgtaaataacaaatttggataattgctttaaaaattttattggtgaatggaacaatccctcccctccaattggtttgtatatcctcggatgaatattatttatttctataatgggacaagattaagcataaattctgtgttcattttgcactttacagatgtaaacgctgagaaaacttgtttgtgtaagtgagtggacaggaatggaaggagttttgttataatagtatcattcatttctatgacgccttctgagatatgcaggaaaaaagtacagtaatataccattaaaaattatctgttattgggcagtttcatttgatcagatccattatgtttcaattttattaaaagcagagaattaaaaccacttgactttcaaaaatgagtttactaaccagtcatcaggttcatctgttttctcaatttctgaaaagtataccaaaaagcttttaaaattaattccaactatatgttacactttcacgtggatgtaccttgtttaaactaatacattcagaaaagtttgaaaaaacagactattattaatacattattattaacatattttatcatgttttaaatatatgatttaaacacagcaaacctctcagctacctcaaaggttgagtagattttgtgaagaatgtccttcatacaacccatttggtaatgccaggcatcaaacaaatcacttaatttctggcagaaaaactcagacttcatttttcaagtcactaaatatattaataatatgtgatttttttaaaacctgagaaacaaatgacagaacaaatgcatggaggtatgtttattatgaagctaatgaagcatatccagaggtcctccttccaaggttcctttctaattttaaatagaaaattatgcactttcatgtataattttgtattctttgtcataatgaaagcctaaaaaaaaaaggcttcaaattatataagctttgggacctgtatctctgcctatacatgtgaaaaaatcatgagggcagtcaggataagctgaagatgatatatatatctggcataattaatttcatattatgaaaataagataatttctcattacttaatttgcaataaataatacagagtaaaatatggctaagattataacttatgaagtaaggtatatggtacatggcatggtcattccttcagtaaatgtgttagggggaggtatgaagtgaattctgactttggggaataattagaagcaacttgtatgaaaatcagaaataacttatttttcctcatgatcaaaattttcatatgtacttaatgaacacaaaaaatatatactgctaaaagcaaatcaggcagttagcatatagttttatttttatatttgcaagtagaaaataaatattttatacaatgaaatgaagttcattaaattttatgtaaatattttagaatatgaattgataaaataagtttgagctaacttattgaataataaacactgtcttagtccctttatgctgctataacagaatacctgaaaatggataatttataaagaacagaaatttatttctcacacttctagaggttaggagtccatgaaaaaagtgctggcaggttcaggcgtctggtgagagctgctctcttctttccaagatggagccttgctgcttcctccttcagagaggaggaacaccatgtcctcacatggacaaaagtggaagggcgagaggggccaaatgctgcatgaagcctctcataagggccttaatcctattcatgagggagaagccctcatggcgtaatcatctcttaaaggccccacctgttaataccatcacattaacaacacctgaattttggaggagacacatagcaaacactaaatctgaagtctgaaagaactcaatttttattcacaggattttgcccatgatatcatttttttaaaaactcaatttcatttaaaagaaactttgttatctatattgtttttcttgttcgaaaaggctcttttgttttaagctaacaatatggttgacggtaataactgggggaaaaagtgcctctgcttaaatgttgtaaaaaatcggtgaaacaggattttggactcctggaggatcctttactctttttactacagaagtacccattggatgatctttgtacattattcttcaccttgtgtgaagacctctgtgctagtcatgagataaggatgtgatgtaaactgtaacaatgggttaggagactgattggagatatttctaagctatactctaaagggacttagtgggtcattagacactggagtgaaagatgcgtcaaaaataattaagattttcaaattgagcagctaaatagattgtgatgctatttattgcataagaaacaaaataatcagcaagttttggaaagaggatggaattctgtttgcctatagatctttaatgtggaaatgttctaaaagtctggagcactaaacaaaggtcaaagatatggttataaatttgggagactttagtatataggtggatgatactatctaagggaaagtttttaaccaagagaggaataaatctgatgaagagaccctgggaaaccttcaatttagaagaggcagaatagtagtagtagtgttgggaaagtataattgaaaacaaaatcttccaacccagaaaacctttccacaaagatagaaggaaaacaattttatgattgagtaagcattagagcaggatgtgatgtgtatcacaagcagtcccctaagagatttgcaaagacagaaggaaatctcacccttttatatagccaacctgatataacccctttcattcaagttcttaggataaacattaactagtcctcaagtaagaagacttgacagcactatttgccacatacgtagtttattctaaattcacttggtaattggagtgactttgctaattggctttatacaaaggaaaatacacttttcatatcttcatgacaggaggtagttttgcagcttggaaggaggctcctgctgaagttaggcttctactcccacagaaactgggagtaagggtgctatcttccttgatgactgaattcccaagagatagttacacgttcttgagaaagacattcatgggtcacaaaactggcaagaggctttgaagcaagagatttttaaaagatttacatacacttcaaaaagacaaagaatttacaagttttctgaatgctctaagaacaaagaaggaggagtctttcttcttattttcaacaaggggaattaattttgttctttttaaatttgtatttacccttacataagtgatagaacagacagaaaaaaacagctgtggaaatgtgcgggaaattacaatgagtgctatatgaaaaccagaggaagagcatattttgcaaggagtgagggaatagtgctgtcttcaagaactttgcattccccttgtggaataaaactaacatacatttgataataacataactagatatgtaaaatttgtaaagactaaatgtaaaaagaatatagcattaggatgtttaattacgtagtatggactgccagtactataggaattcagtggcctgagggcaataagacctggagtaggcagggaaggatttgtggagattaggaaacttaaatgggattttgaaggagagattaaatctatgtaattcacatttttaatatcagtctaaaacacatctctgtagctgtctctataataaagataaacttagcaatggaaccatgatactcacagtccactaggccaaaacgttcccttggatagtgttaatgcttgagtgaacaatgacaccattgctgtgactttttcctttctgtattccttagtcacccctcttctggttaacaggttctttcttttatagctttaagtcttgccttggaaccaatttttttctccagcatatttatatggattcatttaaagcttaacttgcaaagagcagcttattttcacttcttagaaggtactctgcagttaaccttggtgctgtctacagagacaaaaataaatttctttggattttagttatctttctatgtcagagattcccaagaccatccccaggttgacgatttgctaggaagactcacaggactcagcatatatccatattcatggttatgattcattatagggaaataacataaagcaaaattaggcactctccgcctggcacatactaaagttacatactcccagaagaaaagtagatgtcagcataaaccgtattgtttgtacaaacaatctaggcatagtgagtcactcttatttagggaattgtggaatccctcctgaaatctaagttcacaggtgccaggcaaaaaggcccttttaatcatagaagcctcaggcctgctgtgataactcttttctctacatgtttttttttttaatttatacaatgatttgcaggtaaaatcaagagtccacatatcaagtaactgtcttttaaatgttattcatatatttacaggtatgctccagaatcactgacagagagcaagttttctgtggcctcagatgtttggagctttggagtggttctgtatgaacttttcacatacattgagaagagtaaaagtccaccagcggtcagtgtgctttttatttactttcagttttttgtttgttcgtttgatttttataaatttatggggtacaagtacaattttgctacatgcatacattgcatagtggtgaagtcagagcttttagggtatccaccaccttaataacatacattgtatcccttaaataatttctcagcatctactccaccaatggctcacccttccaagtctctattgtctatcattccacattctacgttcatgtgtatacattatatagctcccgcttataagtgaaaacgtggtatttgtctttctatggctgatttgtttcacttaagataattacctccatccatgttgctacaaaagacataatttcattcgttgttatggctgaatagtattccattttgtatgtataccacattttctttatccagtcatccactgatggacacttaggttgattccatgtctttgcttttgtgaagaatgctgcaataaacatacaggtggaggtatctttttgatacagtgatttcttgtcctttaggtagataccccatagtgggaatgctggatcgaatggtagttctatatttaggtctctgagaaatctttataatgttttccatagaggttgtacaaatgcacattctcaccaacagtgtataagagttcccttttctccacacccttgccaacatctgttattttttctctctctcatttttttttccattctgactggagtcagacatatctcactggggtaattttttctcttttttttttttgtcattctgactggaataaggcatatctcattgtgattttaatttgcatttctctggtgattagtgattagcattttttcatatgcctcttgtcagtttgggtgtcttcttttgaaaatgtctattgatctcctttgtccactttttaacacgattattagggggttttggttgaattgcttgagttccttataaattctggatggtagttccttgtcagatacaaagtttgcaaatattttctccgattatgcaggttttctgttcattctgttgattattgattttgctatgctgaaattttttagcttaataaagtctcatttgtctatttttggttttgttgcctatgcttttgaggtctttgccatgaattctttgtttacactcatttccattaaagttttctctaggttttttttctagtatttttctagtttcagatcttacatttaagtctgtaatcgatcgagttaatttttctatatggtgataaatatgggtccagtttcattcttctgcatatggcaatccaatttaccagcaccatttattgaaaagggtgtcctttcccatactgcgcaaagcaatctgcagattcaatgcagttcctatcaaaataccaatgtcatttgttcacagaattagaaaaaacaatcctaaaattcatagggaaccaaaaagagccctaatagcaaaagcgattctaagcaaaaagaacaaagctggaagcatcacattacttgacctcaaattatattataaggctacagtaaccaaagcagcatggtactcatataaaaaacaaacacatagatcaatggaacagaatagaaaacccagaaataaagccacaaatttatagccaactgatctttgacaaaatcaacaagaacatacattcaagtttttttttaacatgagaaaggatttatccaaagaatagtaagcctaggactcactttagagcttttattgcttatttttaaggcaatatcaaacaaaataatcccaaacctattcctaaactagcttgaatttttaaaaaggggatattgggaagctagttagtacagtctcttaatattacttttattaaatccagtaagctaattcattctaggaattattgcataagttaaaataaaccttccaaagtaatttttctcttggtcatcatagaattttttttaatatggaaaagtatgaaaaaataaaaatcatctctaatgcaattactcagagaagaccacctcaatattgtggtatgttacctttcaggcttcattttgtgtataaaagtatatacaaagaagtatataaaacttttataacttttataaaagttcacttatataaatatatattattttataaaattaaggtcatactgtgcagtttgctctccttctgtttcatgaagtattacagcatgggtaatttactgtattagaaaaatgtactgcaaatatgttttctaattgctgagtagcattccatcataaggctatatatgtctgaacaatcattttccattcttcagtcttttaagtaacacttcagtgaacatagtgaacatcctcatgcataaatatttatatttatctctgataattatcttagaataaaagtataagtaaaagttatgaactattttaaaatttttttaatttcaaaatgctttctagaaaagctgtgccaaattatatctcaacagcaatgcatagggatgtacatttcatcatttgccactattggttattatatttttatgtacttttgccaagttgataggggagaagttatatatattttaatttccatttcttttcttaatgtggttgactatatatttgttgggtgtttagggtgggtatgtatatatgtgaattatctcttctgtgctttgcctatctttatatttgtaattttttttcccaatttataagagctgtctatattgaaaataagtaaatgatgtttaagtattttcctagcttataattcagattttaattttataaactttgacatatgaaagttttctttgttgtatttatgcttattcattcattttttcttatattctcttttatattcaactttttatttcaattgaaatgtaatatgataaaaatatgagttttttaacaacaaaaaactcaaaggaaatatgtttttagttcatgtgttttgagccctcctcaggggatttgtgttgagtttattacagctatggaaatggaaattatagaagttccatatttaacagccttatgtttttgatcctaaaagtagtttgttttgaaaaggtttgaaaacatacaaaagcacacatatactaaattttttcccattgactggaggaaattgagaaagaattttgctacaaattaaatgtacaaaaaatattgaaagtgggtttgttttaggaatttatgcgtatgattggcaatgacaaacaaggacagatgatcgtgttccatttgatagaacttttgaagaataatggaagattaccaagaccagatggatgcccagatgaggtaacaatttttttttaatccagggtagtcatgcattttcttttactttttactcaaggacttcagttcacttcctgaaatttaatgtgcggagcttccagataaacagcataatcagatgactgtggaacaaggcatggttatgacatgtgccctgtattgaaaattaatgtcttccaccaattaaaagatggcccttagtgttcatttaattttggtttattttctcctttacagatctatatgatcatgacagaatgctggaacaataatgtaaatcaacgcccctcctttagggatctagctcttcgagtggatcaaataagggataacatggctggatgaaagaaatgaccttcattctgagaccaaagtagatttacagaacaaagttttatatttcacattgctgtggactattattacatatatcattattatataaatcatgatgctagccagcaaagatgtgaaaatatctgctcaaaactttcaaagtttagtaagtttttcttcatgaggccaccagtaaaagacattaatgagaattccttagcaaggattttgtaagaagtttcttaaacattgtcagttaacatcactcttgtctggcaaaagaaaaaaaatagactttttcaactcagctttttgagacctgaaaaaattattatgtaaattttgcaatgttaaagatgcacagaatatgtatgtatagtttttaccacagtggatgtataataccttggcatcttgtgtgatgttttacacacatgagggctggtgttcattaatactgttttctaatttttccatagttaatctataattaattacttcactatacaaacaaattaagatgttcagataattgaataagtacctttgtgtccttgttcatttatatcgctggccagcattataagcaggtgtatacttttagcttgtagttccatgtactgtaaatatttttcacataaagggaacaaatgtctagttttatttgtataggaaatttccctgaccctaaataatacattttgaaatgaaacaagcttacaaagatataatctattttattatggtttcccttgtatctatttgtggtgaatgtgttttttaaatggaactatctccaaatttttctaagactactatgaacagttttcttttaaaattttgagattaagaatgccaggaatattgtcatcctttgagctgctgactgccaataacattcttcgatctctgggatttatgctcatgaactaaatttaagcttaagccataaaatagattagattgttttttaaaaatggatagctcattaagaagtgcagcaggttaagaattttttcctaaagactgtatatttgaggggtttcagaattttgcattgcagtcatagaagagatttatttcctttttagaggggaaatgaggtaaataagtaaaaaagtatgcttgttaattttattcaagaatgccagtagaaaattcataacgtgtatctttaagaaaaatgagcatacatcttaaatcttttcaattaagtataaggggttgttcgttgttgtcatttgttatagtgctactccactttagacaccatagctaaaataaaatatggtgggttttgtgtgtgtgtgtgtgtgtgtgtgtgtgtgtgtgtgtgtgttatttatacaaaacttaaaatacttgctgttttgattaaaaagaaaatagtttcttactttatttttactggtatgttctacttttttgaaagttgtactgaagacttctgattttgggttgaagggaaggaaaaggaagaaatgttttttacattcattattatacttaaagcatttttaaagcattttaatagttctggatgcagaaatcatctaaaatgacagtgaattaggttttaaaaagattttagatttttttgaaagtttaatttttatttgtaaagactcctcaaggatttgtatatgcaacacagtaaggagatcttccattttactacctttcaagtgaaaaatagcctatcatacaatatgcttgatttcagattttcatactaaaacttaactacatacttaaaagtaggttcttatcaagggtctctaacattgctttttaaaacaagatgtgaactaacttttcttaaacatttttttaaatgcttcatcttttagttttatataaagaatcccacatgtacattcttgtttttagaatggggtgactaccttattataaaattccaagtttccaagagacttcttttcattgaggcttcgtaaagttttccattttgattctgactacacataaaaataagataac

SEQ ID NO: 41 - DNA, 10771 bp, Homo sapiens
gcccgcccaccggcctcgctttccagtgcctgctgtctctttccggggcgcagggacccccaggcggcgccacgacccggagctgggtcggaggccaggctggggctcgggccagagcggccgggcctctgggcgcgggagaaggagggcgccccctctccgctcggggtcgtgtcaatgctttgcacttggggccggcgtgcggctgcgggtccttccccaaggccccgggacccgggctcccctcgcctcaggccctttcggcgggtcaggtcggccctccgcgctctccagtccggcgcaggcagccgcaggcgcgggcgggcggtgggggccggggcaggaggaggggtctcggggcccggcggcccgtcattggttaatattttattctgttgacatgttttcttactgctgaggcttccgacaccttctcccaggccccccctcccggccggagcttggcctgagctgtcaaaaccccgcccccggagacccacaattggtccaaaaagcgtaaaatcagcaatcaaggggggcctggctcgttagcgcaggggatccgagctgggcaggacatgtgagatagtcacagttttccagagatcacgacaagatctaaccagtcgcgcgtggtccccggcgccggagcgggccagctcagcccggcccagcccggccccgcgcagagcccccgccgcccccgcgcacagagccgggtgccccttgcggtgcgccggacgggaagccccgaggagcagctgctgcgcccgccacccgggtcgtccgtccaccgcgcgcgccgccgcccgggccgggggtccgagccgcgcgcccccggccccggccccggcccccgggcgcctgggccggatgtcccgatgagagagccggcgctggcggccagcgccatggcttaccacccgttccacgcgccacggcccgccgacttccccatgtccgcctttctggcggcggcgcagccctccttcttcccggcactcgcgctgccgcccggcgcgctggccaagccgctgcccgacccgggcctggcgggggcggcggccgcggcggcggcggcggcagcagcggccgaggcggggctgcacgtctcggcactgggcccgcacccgcccgccgcgcatctgcgctccctcaagagcctggagcccgaggacgaggtggaggacgaccccaaggtgacgctggaggccaaggagctgtgggaccagttccacaagctaggcacggagatggtcatcaccaagtccgggaggtagggctgccggccggctggaaggcgcgcgggcgggcgggcgggctggggcacgggactgcacggatcagagcagagctggggactcccggctcccggctcccggctccaggttctggccctgacgccacgcttcgctcccacggacaaccaagttgacttttctcgtttggcaccggagcgatttttttttaaaacaaaaacgctaaaatcctccgaatgaaataaaacgaaaacatactgctaaagaatagccccaaccgttctgagtcccagcgcagaggaggccccgcggcttggccctggcggtctcctccgccccgcgctctcgctcttctgcgtccgggtccgtctccgagctcgggggaaattcagcctctctcagactctgctccgaccccgaagcccctagtgggacctgggcccagctaaccccacgctggttgctcggttcctggcagcgagccccgggtcagccgagccctccgcctcaccgggctgggagccctttctccaccgcgggcatccgagccctggacgcatccgccgccccaggccttaaagcctgaagaaagccacagccccggcccctccacccttcgactcagccaccgagaatccaggcctcgggttcaccctcttcccccgaactgcacggccaggatgtcttatcaggctctgtagcccagttcccaatacaaacaccctccagatttatttctgggagcttccgtcccaagtgggtatttcccctgaacgaatttcggggagattaaggagaagcgagaatatttctagagggcctagacttctctcctgggcatcagctttcatctcagatcagggagaaagagggtccccagatctgagcacaaggcctaaaggaggctgtttaggagagggtctgacaggcagaaatgggatctcctgggagcaacaaccacaggtggggtcgtccgggcagtgatgagagggcagagcagccgaccacaggggaaacagccaggcggcagcggtgtgcgcaacgaggagggataaataaaggaggagtggggtcctggaacctagaacagccggttccaatgggatctcctcccttccctccctcccaggcggatgttcccccccttcaaggtgcgagtcagcggcctggacaagaaggccaagtatatcctgctgatggacattgtagccgctgacgattgccgctataagttccacaactcgcgctggatggtggcgggcaaggccgaccctgagatgcccaaacgcatgtacatccacccagacagcccagccacgggggagcagtggatggctaagcctgtggccttccacaagctgaagctgaccaacaacatctctgacaagcacggcttcgtgagtgttggggcagggtggggacggtgcaggagcttgttgacccagcactgcagctgagcaggagagcagggcggcaggatctcccagggggaagcgctgggcaaacccccagagtgcccctgcccgggtcactgccctgtggtctacgtgggctgggcctgggcctgggccccagcgctctcctttgcaagcctgggaaatggtggggtcagtggctggcagctcacaatctcagttcctcaggccgtggagggtcccttgtaccgtcaatagggaggcaggtgctgccaggactgggtctgcagtgctggaccacggaggtcaccctgctcttggcctgtaggtgccgagcttggaagacctgcccatgacctcaacttgtccatcacccttctgccaagacccgcgtccctggccctcccccaagactaggggatttaaaagttaaaccaccctccccacccacccccccagcctccctaagacctttccctcctcccacaggcagatgcccaactaggaggagagggtttgggggttctctccatttatgcctgagcaaggccccagcgaacgggggtggtgtttcatagggtaaaaggaactgcccattctgaggtagggcagttggtgagcccccgaaggttggaatctcctctttgtggggttagggggtttaccagtgccagaaaggaagagagtgttaagagtggaattgtagggctctgttttgttttattttgtttgggtttcttttgtggggaggggttgttttttggttggtttttttgttttgttttttgttttgttttgtttttgctctgtctcatttctgtttccaactgggaaattttttttaatggcaagagaaaaagaagctgtgaaaagagaaaagcgagaggaaaagtagaagaaaaagaaataagggtgagaaaagagcagagacaggagaaaatggggaagaggaagaaccgatagagagagagagagagagagagagagagagagagagagagaaagtggagaggaagaggtcaggtacccaaagaatagaaaagctcgggccggggctggtggctgccggctgacccccaccctccccgcagaccatcctaaactccatgcacaagtaccagccgcgcttccacatagtgcgagccaacgacatcctgaagctgccttacagcaccttccgcacctacgtgttcccggagaccgacttcatcgccgtcactgcctaccagaatgacaaggtgcgcgcggcgggcggtgggctaagcccctgcactgacgcccctcaacacgtgcaggcccaaccgtccgttcatcgcccctcgaagccccctgcacgggatccgcgctcttgcggcccgcccccgagcaccgagcctcgcatccatacgcgcagcactcacggaagtcctcaaggcgccctctcaatcccaccgcgcgcacacacaggctcccctggggcgagcgaacagctgggccgtcgttctgatggagatgtttacttaacaattagctgagactccgggcccgcgctgacatttttacattttattcgtttatttcttggctcaggaatgagaatgtaagtgaagagagggcgcccgaggcaatctgcccaggctctaccgatgctcagaacccggggcccagttttcactctctcggggggagccagagggtgggacaggtgacacagccccccaaagcactcctggctactgctctgggtcagtctaggccccagaccccttgggaggcgcttagagaattaccttccaatcaaagggctttttctgcttgcggcttctccacccttgttctagtggggcagagcatcacccctctaggcctgtgcccttgtgcgccactgtcgagtgaaagagagggtacgagtgtccgtgccggtcgttgtggctttgtgaaccaaggtgtacgctgggctgtgcgtgccccgtttggggtgtgttggatacctgtggaggcatgtgaattcgtttggttccgtaggcgtttgttatgtctgtgcacacttgcgtgtgtgcgagcccgtgagtgtgatttggctttgtgtgtacctgcagccttgcgtgtgaactgcagtctctgttcgcgcctgctcgggtgcggagtcgtttaacttgcgcaagcccgcgggcgggtgtgcatgcttgggctggttccgacactgtggcactgctttaggcctgtgtggggctgtctaggcctgtctagggataattcctcgaatgaagcttttggaggacagaccccgtcgctttccgcgaggccctcccaccggcctcagctcggggcgtcccatcccaggcgggtgggtaccaagtggacgctccccgggtcttccctctgcggccagcacccgctgacctcggggtgccaccgaccacgctggaagagccacggcctgacttagcgccgcccccttggtccccgcagatcacacagctgaagatcgacaacaacccgtttgccaagggcttccgggacaccgggaacggccggcgggagaaaaggtgagaggccgaggacagcagccctgtggcgggtgcccgcgggagcagcgagcaggagggatggagggatgggctccccgctgacctggttcatccgctcatccccaggaagcagctgacgctgccgtctctacgcttgtacgaggagcactgcaaacccgagcgcgatggcgcggagtcagacgcctcgtcgtgcgaccctccccccgcgcgggaaccacccacctccccgggcgcagcgcccagtccgctgcgcctgcaccgggcccgaggtgagggtcggaccggaggagggacagggaggtggcggcggggggtcctcaggtcgctgggctggtcttttgctgagccacccgctaacctgaaaggccaggaaggaaacgtcggcgagtgtctgggatggggtttccgtcccgggactcccctacgagggcggtccccggtagccagaagatccggccggactccgagcctggccccttgggcgccgtgtaattctatagctgtagggtttcctctccagggctgggttccttccactgtaaatctggggtcttggattaggtgacctgcagctgccctttgcccgactccagcagctcctccgactcggcctccccgagagcagcccttcccgagtgtccctgatcctgctcgtcggcctccgcccaggcccctgtaatccgcgcgccctctccccgcagctgaggagaagtcgtgcgccgcggacagcgacccggagcctgagcggttgagcgaggagcgtgcgggggcgccgctaggccgcagcccggctccagacagcgccagccccactcgcttgaccgaacccgagcgcgcccgggagcggcgtagtcccgagaggggcaaggagccggccgagagcggcggggacggcccgttcggcctgaggagcctggagaaggagcgcgccgaagctcggaggaaggacgaggggcgcaaggaggcggccgagggcaaggagcagggcctggcgccgctggtggtgcagacagacagtgcgtcccccctgggcgccggacacctgcccggcctggccttttccagccacttgcacgggcagcagttctttgggccgctgggagccggccagccgctcttcctgcaccctggacagttcaccatgggccctggcgccttctccgccatgggcatgggtcacctactggcctcggtggcaggcggcggcaacggcggaggtggcgggcctgggaccgccgcggggctggacgcaggcgggctgggtcccgcggccagcgcagcaagcaccgccgcgcccttcccgttccacctctcccagcacatgctggcatctcaggtaaggcctgtgaccccgcggcagcgccagcgagggagaaggcccagggagctggcggcgaggccagcggagggcctgaggggtgccagggtcgctgggatcctctggcaggcaagaactccatccaggggaggccccgggatgccctttaggacacctgggttctgagagacgaggactgtgttgtaagtccaggggctggccagggcgccgcttctgactcccgtgtgacctttggcaagtccctgaccctctctgggcctgcttccttccctatagccccagcgaggagtgcggtgcccatcgagactcttctcaccctcacagaccagggccacccctggcttgtgaagtcttctctcctggcctcaggacatttttcttgagaacaaagacccttggctccctgtccattctgaaaggctaaggtggccagacagacaaagggagaaggaacatttgcattattttctggacagttgaccaccagccctcccagaggtctctggcccctcccaggccttctacgaagtcctctgtcctggtgaaggacaaggctggtctttcccctaccttgagttcccagcacccccagccacatgtcagggatgagaactcagctcttcaggccccattgaaattccaagctcccaggggagtgttgacgaaaatgtggctggggcacagtaaggagatccgatggggacagtggcctctttggttgcttgggtggaatattccctgtggaaagatttggaatctcttcattcattttcttccctctgaggtttctggcaaattgaacccctgagatcttatctcaagggaaggaaaatagcagttcaggtctgagaaagctcctttgcttcagcagcaaatattttaaaagttgggttggtgggtgggggggtggggggttgggaggcaggcgattctgaaatgagttttacacacagctcagtgttagggtgtgtggagtgtttgaggtatcaccatcactcatctggggctctgggctggaagggaagcctctggagaaagttcagggcccagaggtttaatctgcacccctgattatttgtgtatatgaatgcctcctccccagacaaactggtaataatcaccagcatcacagaggtcatgaggaagtcagggcttctagacacagcctggccaacaggtgcatgacccgggtgagaataccagcacctgggaggcatccgttggtagggctgctggtggttacattcccaggccagtgcagcccatcccagacatcaggtagagccaaatcccaagagaactgaagcctccctccttcctcccaacctgggatgccaggtctgaaatgcccagtaggacctgactgtctcaggagggggtattttctcaggcctgatgaagctgcctcttttcttcttcctgctagagccaggcctgaggctccctgggagcccagtgcaatcatcagccccctgccctcctccccatacccactagctctggggagtaagccattatctcaaaggtcaggccgtgcaccagccagacctcatgaactcaggaaggtgcttgtccaggagttcctggctgctgtgcccttcacaggcaaagactgcattccttcctcagctgccagtgaggtgctgccaggcattccctgtagaactttcaggccagtttatgaactggttggcacccgtgtcctcctcctggcccaggcaggagaaccatgagcaggcagaaggagactttgcaaagtgccttccccagcatgtgtgccctctgcccttcagagcctgcagataggaggggtggcgaggacactgttctcaatgagcagaacctccaagacacccaaagctgcctgtttgccacctggccctatgcctgccccgttttctccctcaaggccttcacccgtgctagggcagtcacctggaatgtcctttccattacccctgctgtaatgcccagcacagaacttgatggcaggcctttgcatggtagcctgaagcgatctcacccttctaactgggtttggccacaggcacactggctcatgcttacctgtgctgcctgtggttatagttatgcgaattgtggttttacatccctaaaacagaagggcacggtgtccaggggatagcacccagcccaacttcagaaagacttcaggcaagatgtctaaccctcgtcttgttctgtttcttccagggaattccaatgcccactttcggaggcctcttcccctacccctacacctacatggcagcagcagccgcagccgcctcggctttgcccgccactagtgctgcagctgccgccgccgcagccgccggctccctctcccggagccccttcctgggcagtgcccggccccgactgcgtttcagcccctatcagatcccggtcaccatcccgcctagcactagcctcctcaccaccgggctggcctctgagggctccaaggccgctggtggaaacagccgggagcctagccccctgcccgagctggctctccgcaaagtaggggccccatcccgcggtgccctgtcgcccagtggctcggccaaggaggcggccaatgaactgcagagcatccagagactggtgagtgggctggagagccagcgagccctctccccaggccgggagtcgcccaagtgaggggctgcccagctgctcccctgccacgcaggccacccgggctgcctgcccctgctgcttgggacgtgtacagcacagaatgagtatttatttaaataaaggagaaaagtgggctgcagcagccggaatagagcctcgtctggcaagtcggggcctgggacacttccctgggcctcaacaaggatcaggctgctggaaacacagtcacttgggagctgctgggctaggtccagatccgctccagcgtcaaggtggcatccgaaggtgtctctggtcttccagcgaggtgggagaggcctcatccagggcccagcggtccctgcagaagccagaaggtgcaggggccaggggtgggagcatcggagggagtcccagagccctggaccttgggcctagaccgcgtgataaaactgggttgagggatgctggaaccagttacgactgaagtcagtgtagacctgagctgggagggaacctgttagtctccccacctcttccctgaagagacaggcacccctcccagccgtggtcaacggagggagtggcacttctgccttgagtccccaggggaaaaaaaaaaaagatatttatgaaataaatggtaatttgtgtaaataagctttaaggttcccagaatatgcaaattggtattaatttattcaaaggtgtacattgctgtgtacatatatttagagattaactcatacatttaaagtttttttcattttacgtgagcatctatattgtacagggctgggggggcccttggctgcgggagaaggcccagagccctggaggagccaccaccccgccggcccctcgacccctcggcccctcggcccctccgcccgggtttggctcgcccggcccgcgggctccacctcaggttttcacttttcgctccggagcgagaacgaaacgacaaaaacgcaagaaaacaataaaacgctagaaagcgaagtgaacggcgctgtgcgctctgtgggtcgcgcggggctggggcgctgcacgcgcgcaaggagggacgagaggcggggacaaaaggctgcgcgcccctcgcccggcggcagctgcaccccggggacggcagggcggcacggcggcagggcggctggggcgctggcggagccgcgaggccgggcggcgccggcgcgggacgcggggtgcgtcccaggccggggctggactccccctgccggccgctcccgcagctccgcgcaacgggcctgggcacccacccgggccgggaggagagcagccgagcggcctggactcctggcttctgactccctttccgggaaaccacactggaaacccatctcctttcaatgcttctgggtgggtgggctgggaggatgggtgttccttgtccaacctctcccttcggaggaggggtttggctgtgtcccacccccgtactccccgccaaatatcgctgagcctagaattctttcccctctctctgcctcctgaacctcaaagacaaacatttcctccgcgtcagggctgttggctagagtggcaaaatctggactaaaaggtcttactttaactcatcta

SEQ ID NO: 42 - DNA, 33907 bp, Homo sapiens
gggccgtgcccagggcctggaagtgcaaggccgcgtggtgggcatggtagggaagcggagcgtgggcctgtgaggcgcgtgtgcgcctgcgacctcgggaccggggctcccaaatgaacagcgcgcacagctgggagcagggcttggggagcggggctctgcggccggggatccgtagaagccgctgcctggaagcgggcgccggcagggggtggccagacccggtcgtggagcgtcctagtcttcgggcacggcggggccaggcgagccctcctggttgtcgagcctcggctgagagccgggctgctcgcccttgcttcccgcctctctaatctaaaccatgcggggctcccagcccctacccggctcgcggggcccgagggccaagaggagggcactgggccgcgcggtggaggagccggcggctcgcgtggggctcgggatcttggggaccgcgacgccggggaaccctggagcccccctccccgggggacagcgggcgcagactgattgacagcggcgacgtcagcgcggagggggggcggccccagagggagggagggaggaggagggaattgaggccccaaagtgcagccttggagatcaagggcccgctccagagccgggatgtgtccagccccgagggcacggcaggcagctggaccctgacccagcggcgcggagtcggagccccggccgtcccgcgctcctcggacccgaacctgcaggggacctcgggccgctggcgcctccgcatgcggcaccgcaattagggtgagtgtgggttccagccgagtggggacgagctgggcgtgcggggctggggccacaggggctcagggttaggctgcggggacggacaggaggatgagctggaaaggggtgagtcacgcgacccggggaagaacttcaggggcggtcaaagttgcaggaaggcggcgcgaagtgccttgggtcgggccgccgcctcggcccgacacccagtagttggggcacgagccctcctctctgagtaacgcgatgaattgggtctagagatccaagagcatagaaatatcgacagcgccagcaccctaagaacaaggccgtgacaggcggagcggtggcctggaaattggtgtttgcagaatatgcaaggccaaggaagagggccccggtactggagcgaaaatccgtgtagatatgtgagtgatcagaacactagactcagagcctttgatgcaatagactagtcaaaattaaagcaaggaacattatatataaataatgatcgatgattaaagattattggaatgtgaacaattaccaaagaaagggctaatcggcataactgatataacacgtgaacttccaaataatacaatcatagtcactttcagaatcaagtgaaaatagtaatcacaatttttaaaaggattaaagacaaagtaattctaaatagaggaacaatgtaaggactgtttattaaaaccaattgcactaatataacatatagtaatagtgtaacaaattaccaaactgtaggaaactagcaaacgaactgtaggagaaagatgaacaatgaaaatactattaagggaaatactattagtggtagtgatataataatataatgtattattgatactacagtgaactattaaaagaaatattaactaaaatcttaggagcaatagtaatataaataaagacatattaacaagaattgctggagtaatatgacaatttatgaccaatgtattaatagtcacaagaacattataaataatggttgagtaataagaagtattgtaccaatgtgatgaaaaataatcagagtattaagagctacaacaatattacaaagtatgacaaaataacaagaagtaatgatgtgatgagtaactagcgagttcagatctgtaacattacaaataatgacaaagtaacaagatactgtcggggtgtgttgaagaataatacctggagtgttatgagcaagcctaacaaaacaaattgtggttagataacaagaagtattataaggatgtgagggaaattaacatgaattttgagaacaattatataacaagttatggtaaacaagaagttattgaaacagcgtgacaaagtataatcaaaatgaagagcaagcaacggaaacgtattagggatacaaagcaagaataaaaaattacaatagattaacgtgacctattgttcactatgtcacctcgatattggaaatagtattatgaatgtgccaggcggccctgaaatgatggaacagtgacaggaaaacaacaaatttagtaacagtaagctaacgaatcaaagcagggctttaaccatacagtattaaagatacaaagtagtaataatccacgcgataggatattctcaaagttcccgaactgatcaaaatactactatggtaataaggacaattaaaatattttaaaaagcacgaaatagtaacagttcccctagtgcaagaaacatatccccagtaacctaaaaatgaaaagagaaatgctgtcgtctttggaaaacgaggcagctgaaagcaacagaccccatcgcaaaggcagcggaggttgcgggccgcacccgcggaggagtggatgtgaaggacgagagcggaccgctatgcggtgctgagtgcgggaccccgcggtgctggcggcggccgagcgcgcccaagctcgaggtccgagaggaccgcgaggacggccgccccgggccagccgggcgtggaaaaaaggaaattgctgggaagggggcaagctgtcccgaggtctggatgtggcttcgtggcggagagaaaaggaagaggcaaaccctgagcccgggagggagagcactgagcaggcctcgtccccagtccgagctgcgggaccggcgtcagtggacgcgggcggtgaaccagctcctcacagggcagggctgagcgcgtaggactgagagcgcagggcgcgagccgcagggctccgctgcacggctccgggtgtgacaagagcccagcagaggaccccatggccatgcgggccaagcgcgagacggcccctccttgcgaccccgcaggccgccacatctgggaccagcggatcgcttggtcgctggagccgatcccgccggggccctagatatagttggacccagcgcgctggccggagcgggcagctaccctactggcgcagcggccctgtgtggggactcctaggtttccgaggctcggcccgcgttcgcacgtggcccgaggcgggtgctggcgctggccatgtccagcgagtctcactccctgcaggctgtggccgaagactggtccgcctgtcaaccttatctttatgggtttttcccaacccagactggccccggcccctttttatctcctgggttgcacttggcttgtttactttgcgaggtcctgggagtcgaagtctaagcccgggatgaggaggcctctgaacaagatgggcgagaggcctgagcccggggatgctccgggagggcccggggagagcgggaagaaggtaggaagagaaaggcggggcattccgcctcaagaagggccgtcagacctacagaaagctccgctggagcgcccaggtccagcaggatggggaagagcagggaggtggaaaggggaagcggagcaagcggggcacacccttaagggatgcgggcaggctggcctctcaggctgtgctctcatcccgaggccccaggacctgcttcgggcagggagcaggcacctgagtaggcgagggaatcagccaagacagccgaagaaatgtagctgtgccaggcagggctaagcggttcctgtgaatgggcccagcctgctggcctggtccttcactgggaagggtgtgggtctttaggcccaaagcagagccctgtggcgctaaagtgtgcctgagtgagcctgtaggttcgaactcgagcaccaggtaggggaggcctgggctgagggcagagcctggatcagtcacccaggagagtgtggctgctcaggctggtgggatgctgtgtgaggggctgtgtttgggtgtgaggatgtctgtgccagaacgggaagaggatgtgtgtggacggggagtgtgttggagtgaaagcctttggttcaggaagtctctacctcagtgctgtctgaggggttgggtgagggcagatgggtgagctgggcctgaggtcctgaggccctctctgcacacaggtgtggagctgcaggagcctgggccctgccctccagcctggctctcctttcctgcatggccaggaggtgtcctggctgtcctgggcccacagagaggcctggaccccagttattggggaacagccgagaaggcccaggcctcaggctccaccggagctcagtaggagtgagggactcggggtgcagctgtggcaatgccgagagggcggtccctcccctagacctactcatcacagaaccccacacccaggggcaggcagacattgaactgccgcagaccctcccaggtccacagcctgaagggaggaggcgagggacctgccttccttgcgggttccctcctccagctcaggagggggcggggtccacgtgctccagggctgcctccgcgccccgcacgaagtcccggaatcggctggagagggccaggggtcctctggcgagtgtggacctgggcgagtgactcgttgtgtgctgtgcccgcaggagatgctgcaggataagggcctgtccgagagcgaggaggccttccgggccccgggcccagcgctcggagaggccagcgcagccaacgcccccgagcccgcgctggcagcgccgggcctcagcggagccgcgctaggcagccccccgggacccggggccgacgtcgtcgccgccgccgccgcggagcaggtagggctgcgccagccgtcgggtagaagtcgggcgtcggtctgtctgcggggccgcctgtgtccgtctttccgtccgattgtcggcaggactcgctttcaggaggacctggctgcattcaggacggtctgcccgttcgttctccactggacatggctcgctttctctgccttttgggtccttctccactttgagccctcggggctactctgggacaagcaagagctagagctagagatagaggagagggcggtaagagagagggagacccccgtagcatctgagcgagcctggaccaagtgtccagctccaacaacccgtagagggcctgggacccaacggcgagggggcaggaggaggccaccccgccggtgcgcacgggagccgctgcggggatccgaggcctctgggacgtcgccgagggcttcacagtgataatcggacgatcacagcgcacgggatgccgcctggggatctgtgtgcactatctgcaggcgcgcgcctggccgagggtgcgtgcgcctctccctgtctgtgtctgccccgggagcctgtggcgatggcccgccacagaaatgttcatgagtgagcaggagtgtcgtctaacctgcgctggccactatgtgtgtcctctgagggttcctccgtaggtgcagctttaaaggaggaagttttagccaccgattaattcttttatattcacgaatagttcaaaatcgttctgtgaaacgaaatctggagccatgggctccgggcgggcagggttccgcacagctcttcgggtctggttcttctttcctcaggctccgcgtggagccctgggcctggcagacacaagtttctctccctcccatccccagaccatcgagaacatcaaggtggggctgcatgagaaggagctctggaagaagttccacgaggcgggcaccgagatgatcatcactaaggctggcaggtcagcgctgggagatttacttccggggatggcggtggggagcaaggggggccagggaggtcccttagaagtcctctcggccccggcctggtggcctgtgggaggcctctctgcctcctcgggcgtcagtgccacctcccttcgcagcttgggactgggccgccaaagcccgcagggggccaccgcagccgcgcgggccttgcgggaaagaccgaggggaggggcagcgctatgcaaatgaatccaaacagggatcgcgacgctcaaaagtcccagctccagcacttttggccccctggggggctgctttgccctcctctctttgaggacctgaggaggtttctcaggaatgcattgattggagacccagagatgcctctcagcagatggggagagggaaatagactatgctgttcagttttcatacattttcgtgagtgactcgaaccccaagtttttcatcccaggggcgccgctcttctgtttccatccccatctctggccaacgggaaagcactacgttgggctccgtgtgtgttgttgggggagcggctctcggtggctgccagaaaaggatgatttataaagtggaaacatctttaaaatgcgctggtgtctgtgggagagaacagggaggagaggatgagaggaggaagactcacggcgggggtgggggtgagtgagagattcgctggggctggtggggtgggggcaggagtgtggaggagaacggttatcaggtgaaggtggattgctgtagacagagacgctggcaagttcaggttcaggaactccctccccacccactctatcccctgcacatacacacacttgatttctgtccctgaggacagattaggtgtgaaaatgtccctttgcctggatgtgtctcataattgggattttgaaggaataagatgatgaaggctcaagtgccaggaatttggagtcagaccacggtgggtgagggctgcagttccaactcagctactttcatctgtgcaacctcagacaaggtgcttaatggtctctgctccctccccactccatctgtaaaagaacaggtcttgcctcatacattgtatgtaaagcaccaagttcctgtcacatgcaagcacacaagaagtgctagcgaataatattagcaataattagagaagtgtctggcgtcccactcagtattttcttctactttttagagaactcagctctgctgaaccacttagtgaatgatagactattcaaaggaaacaaaaagccggctggtttgctgtgtgcagcgtatggggtgctgtggtccttcctctctgctccctggcaggccttataaagtttcctttcttttgttgagggtggaggtctgggcacttggccaccctcaggccttagccagggaggtggcatcaccactcagggcctctatcaggagagaaagtaggtttagtttagggcttgagcttgctgtattttggggatggagatagggaaggaagacacatgaaggggctggcagagggtgcgacatggagcaggcattgaggacagtggaagccaggtgtcacaggccctgcctctttctggctgagtgtacttgggcaagtcacagtctccttgtagctcagtggtgtcagggaaatggtgaccgtagacctatctgctgtcccttccttttctatcactgtgaaactcaaaccagggaatcacgtggatgatggttggtaaatggataatccacttgatcaagtgcgaaggggaatggggctatttcttgtgcctgctagtgtggaaagaaggtaagaaagagaaaggttcagaactgccatttttaggcagcagaaataaccttgtctcttgaaaataactggccagcatgttctctgggcatgtctggcctttggcattttaaacaaagggcatttttgtttgtttgttttcctcagtagtgtttcctgcatctgcatgggtcctcctcctccctctcccaacacatacacttatacacatacttccataggtggccagcttcaggcagatgtttgtgcttgatcctagttgaggcttagagatggaccttagggaattatgataatatttctaaaatggctgtgatgatgttggccaattatggatccatcacagcctttcacttctctggcagaaagttatccttgcactgggtctggttcttaagaaaatcactagtctcatgcccccaacccctcacccctcacagaccccatttcctccttcatagctgcccccctccttcagcaaccactgtattgctctgatctacgttactcaggctgtggttcttcaacatcctgtccagtgcctctccctgctccccaaattctgtgtgcctctactggaacccttcttggtacacgtccatttgtcagcctgggccctgctgctaaacctggaatcatagcttcctagatggctagagctggaggagaaccaagagaacgtaaaccaaaccccagagaagggaagttaggcagttaccaggtccacacaggaaaacagatgagacaccccacccccagaacacagcccctactttgataagttcccttgattgcttttttacggggtcctattcagtgtggattgtggctctgccctagagaccctggctgattagggacacgataactgccatctggctgggtaggagcaggccctggaaaaggggagccagaatgttctcaagccaggttgagttctcagatcacaagtttccttcctaccttagccctttgggtccttgagagtcttgaaggttgacagagagaagaatccctttcactggatagtgactttgaactgccaaacaatttggcctggtggataaaatgccaaccacagtgggagccaccagtttctgaatactcagcgacctccatgtcaggtgtgaaatgggggccacagccctccgcagcccgtctcagtctcttgggtctctgtgtccagagggttcgtgctgatagccgcagacagcagatccctctcttggcctccccacatccctgccaagcttgatacatgtgagaaactgcattttctcccaaacatagataaaagtgagctccacaaaaaaatttaaatataaacctccccaaaatgaaaattgcctaactgtctcactgccctactcctaggtcagggttttgccaccagataaatctccactatcagccttcatagcctgttgagttcaatgttgcttgtgttagtgacagtgaatttgcgtttgaaaaatgaactaccgatgagaactcctgttgaacctgtattgtttgttattctgaggcaaggatttggcccggcttaatccggggcttcaaagccaattgccctcactctgtatacagagcgtcagagcccagtggcgtggatgataagagaagtaagggttgaagacactgggaaagtgggttggggagagagtgctttgatctctttttaaagtattttctgaaagcaaaagtctatcagaaggaagtgcctttaaaaaaaatctaagagaagcaaccgatcttccaaaacaacatccattccacacactctcacccctgcccctccctcagggaaaagatttcttaaatatgctttgggtgaattagaaaactgtgtgtgtatgcctctatgtatgtgtgtgaaacgtggaaatcgatttattatcttcaaaatcagaactcacttggctacagaaggcttggtctcagtgtaggtggcaccagcagccccactcctaaccccagccttggatgctgggccctggcctcttccccgtacacccaggattcctcctgaaaagcccccacggacatcagggttggagaaacaaagggttttaaggggacccctgccatttcactgctgtagggttcttttcagactctgagctccaaggcgcctgtgtatgtgtacacacatatataatttttaacctaaatgtattgaagtggaacattcctacagaagagtccacaggtcttaagggtgcagctttacagacttgcacaaaataaacacactcgtgtaaccttcatccagataaagaaatagatcatcaccaccaccgccccagaatccttcttgtgtgcctgcccagtcagagccatccccacctttgaaaccgctctctagacttctgaccccttctggctggtgttcccctacattaagggagggtccgtgtagctgttcctggagtccccagggacctccgagaaagtcggggctgcagcggggttggggcttgggggaccctccaggtggagagaatctaggggtatcccctagtctctgtccctttccccaggaaaggggctgagagtaagcgccttgaatttggccaccgctttggccggggagctcccgcggctctcgcagcgcagctagaacttgcgtgttccctcagcagtgagttcgcagttacgggtttgttgccagaattaaaaaagccccaaacccttgccccgcgccccgcgcgcctccaacaccgagaaacgtccgaggaagcttatcttagcagttcattctaaagccatttccgagtatgaatagataaaggctccagctccgcaccctttcagagcctgtttcatgatcagaggagaagccccgggctttcatctcctcccgggccggcgagcaggcggcttgtttattcccctggcggagccgtttccgcgtgtgccgtggggagggcgggggagcccccatctgtctgggggcgcgggagcccgacggcgcgaggggaactgggggagcatggagagggcgcttggggcgcggagagaaggtgcggggcacgtggaaagcgtgccgaggggctgggaagagggagggacaggaggacggggtgggagcagggagagggtagggggcatagggagagggtgcagggaggggagagggggagcgcgcaaggagggggctggctggggcggacccagaggtagagcgcagagtgcccgggacaggcgggcttcaccgccagcgctggtggcagggcctgcgtggacacaggcggcacacacagtgtcttccttcttggtcacctcccccaccccaacacacaaacagggaggcgttgctttccaccgtagggtgttggttttcaggtacattctatgtcataaatcacagaaacaatttacatctcactccatcatttcaaacctttcatgagagaggcagagctcacaggaagtcacagctcccaaacccagcctggcctctgtcgcctgaggcatgccacgctggggaacacccccaagtcaggcgtctaggcaccaactttagtcccttcaagaacccaagggcagatgcccaaggggccttgaattctcccctcgacctgggcaggaagccaatggaggggacagagggggcctcactttcacaggcagccctttcccaacgctgggtggacccttcctccttctggagccacctaggcagggaaacggtagtgcttagggccccccaccccaccccagagtgggttctgcatggctcagaagcagtcccccaactagaccctgccaagacctagacatctgttgcattgaaggcaatggaactccctgaggcagttcaggccacagcagagggcttttgaactccccattcagaccagacatcctacgtccctgtccctcggcttctgagcgctgctgccttaggtagaggggaattggtgggcaggggaggcgaggctgggaggtactccccttccctgtgccgacgcccacatctccttatcagtcaggaatctggcctacgatcagcttccagcaggggccaggtcccaagacaccagctggggctgcagagaacaggctcctcaaaggccttccagaaagcacttagttagtgtcagcctggccccctgggctgtggaaatgaagcccagcagggagaaggagaggggaaggccagggccccttagcctcctctcagcctaggctatgacgcgtgccaaagtggcagtgagcccttcgctcctggccccctatgtggacactggccctggagggaagccatggctgccctctgctgttgccacctggaatgatgacaggaaacaagctgagtgcaggcccccggtgccaggccagcccaagtatggccagggctgccccattttgtggctgtttctgtggcagttacaaaatggtggcctgcagggggcgggattcttggccttaccccagggaagggggaggtgaggcagctgctgccctccctgcttcagctgttggcccaccaggagagaggcagggccgggaaagggtggtgcaagatccagctgcgcccccaggccccataggggggctggtaagcaggaggcagggttgggttcctgagcccctcacttcccccattcctggagagggggtggggtgggtatttgaaaatgctttcaattgacatctgagacaaattcttccacaaggtttataagtccctagacttgcagctagaacttccctcctccctccaggcacgcacacatccacacatgcgcacttgcacaccgctcacatgcgcctgggcacacacaccccacatccccacgtccccgccctgcagtgcttgcacaggcctctcctccagcaagagaggggcacaggcggggctgggtggggcgtgggctggcaaggaagtgaaccctccacctcggtcggggtcctcgcctgggcttagggcccgccagcttatagaggccttgatcctttctggaagccctgttctgtccaggtaagctggtgcccctggtgacaaaataggggcctctgatcagctgtttgtggcatcttggacagcttctccagggtcccgtactgtcttgggttagtgagaggcagagaaccacctgatggttgtcccagagtggaccagccgggcagtggcacagctcagtggggcttagtgtcttcactgtgtcttcagctaggtttggatcctgtttctcttggggaacacctttgtggaagatcagctggggtgggggatggagtctgaggaggatcgtgggaagttccgttcttccctctggtgaagtcagggacctagtgactaggggagggagctgtgcccagagcgtttgtgtatgcgctgtgctgttgtgtgtgcgtatgtgctgaggggtgtgcggaagccccctctagaatgtgcctcgaacctcagggcccttgacagcctcagcatgggctgcaggaaatgacaaactttctgggttttggtgaatccattttcacagaagtaggtcataccacttctccatttactttgctgagggaggagtgcagcaggggtccgtggtaattcacgcagcaatctatgagataggtggtaatgttatcctcattttagagataaggaaaccaaggcacagagaggttcaagcaagttgcctaaggcttatcagtggggtccaggctgtgaccatggcaggtggtttcagaatccatgccctctcttatccatgaggctcctggaccgactttcccctgatactcagggtgcacaggtccaggtgaggtgttcacagggagaagtacccccgatagacacactggaagaacccaaacctagcagggttttggacagcagtctcctgttttcctgcaagctggttttaggcctaaggatttccacagaggcatgacccagaggaggcagctcattatttatggaagcagctgacgggggtttccgtccccctataactgcaccccagaacttcacttgtgtgtgggctggcaaaggacaggagggaaattaaggcagcaaggttggcgtcagaatctgctcccacaatcctgactggggtctctgtgcttcagctgctcatgggcactagccccaagtcttaggggattatgggggaggggataagtgaatttgggaaatggtgtaaactctcctcctagacacagactgatagctgcaggggctcagagacagcagccagtgccaccttttcactgtgcagctcgggcagagggggaagtgagttgtgcaggtcacacagctgtgaccaatgccaggatcgctggccaaaagggcagcatctgttagcggccttctgcccccttgctcactctgttccatctctcctggtgctctgtccacacgctccgcctcacccctcggctcccccaggaggatgttccccagctacaaggtaaaagtcacaggcatgaaccccaagaccaagtatatcctgctgattgacattgtccctgccgatgaccatcgctacaagttctgtgacaacaaatggtaagtggaccctgaccgcatcacccacgttccctcaactgcccacttgccacgcccccacctagtgttttgtccgggggatttcttagctacctgagtgactgcccaggtctgcaggctggagtccactgcctggaactggctgtgcggaggctgaggtggtcagcgaatgtctgcatgcctgcttcaggtggggctgggtttgggctgaaaagcagctgcgtgtttgggagtttggtggatcgcaagggtctgtactctccttatggccgtgggtagtcaggacttggtaactatgctgtcaggtgacagacaaatcattaacactggccagatttagactgtcagtgcttcactgtggggaagatgggagcagttctcttggggactttaagggcaagccattacctgctgtgtgggggcactcgcctgtttctccatgttctccttggcttcaggcccctccagccatccagacgaagtgaggctccaccagggggttggtggatgggaccctttggcaaggggctgggagacatagagaggtaaagggacaaaaccaaaaggggccaggtaaataaacgctgggctacctttcatgaagccaactccttagtccctgactgcctgggagctcggaacagcgctccaggagcgagcagccagccaggacactgggctccgtggcaagtgagccacagagctggagagattgggccgagcaggcaggatttggtggccacgtcctggcaagggccatgtttctgtttcttctccctctctgggctagaactcagagcaggctctggctgcggggagagctaccaattaatttcttaccattgttttggggacaagccttttgagagttgtctaggtcctctgagaagctccctctaaataatataatttataacatgtgacaatcataatcataccaggtgtagcggctcatatctgtaatcccagctactctggaggcagaggcaggaggatgacttgaaggtcaggagtttgagaccagcctgggtaatatagtaagatccttgtctctgtaaaaaatgtaaaaagttaactgggcatggaggtgcatgcctgtagtcacagctacttgggaggctgaggcagaaggattgcttgagcccaggaattggaggctgcagggagctatgatcataccactagcatgggtgacagagtgagaacctgtctcttaaaaagaaaaaaaaattttaaatcataagtgtaaatatacatagaagtgcctaaatctcctcacaatatctttgtgattagccccagtccttcaattaaatgatcccatttccctgtaacctcccttttcttttctactgcagtaaaataaaggagattcagaactgctctctcctcctcagcattctctcctctgaacctcacactcctacccttgaagtactaatttgacaatgtggtgggaccagcagctattttttcctctggtcaatgggggtttgctccaagaggggacggggaatctggcctcaccagcccctggagtaatcacctgctcttatctgctctgttggcaggatggtggcagggaaggctgagccagccatgccaggaaggctgtatgtccacccggattctcctgccacaggagcccactggatgcggcagctggtctccttccagaagctgaagctgacaaacaaccacctggacccctttggccatgtaagcatgggggctgcctggccccaggaggcaagtctggggcagttttaggggtgggacaggccaggatggggatagggagaatccactccgggatccagctccaggctttggcgctcactgaccagtttagggaaggagctcaagcctctgaggcctgcagagagctggacttccttcccggccacttactggctgggtaactctggacaatcgtctcagcctttttgagcctcactttccttgtctagaaaatggagatgaccacatgtacctttcatggctgtgagacttaaatgagagggtttaccggaagcactttgcacgtaggaggggctaaataaatggcagctatgatgataaaggtgacgggtcagatctcagcttcagttccccaaaatcttgccttgctggaacataacacaagaggggtaagccttttcgagcgagagtcacggatatgttccaaagcccctctttggtgtgtaccgtctgcctggcctgacagccgcctgcttctgggagaaaagaccttgctctggctcacatgttagctcctgctggatttggcctggtccttacagaagagattctgaagccccagggatgctgctgacgccccatccaggcagcccaagctcattctttccccatctggccctggaaagtccacaaaaaagagatttttatgtggaaatttttagctcaagtgtgtggcaaacagaagtctggggacctggtactatctgccagggcacaggcccctcccctcgagactgcccgtggtttctggggaagtgcagggcaggggcagtggaggctttgagatgcaggtgtggctgttggggttacgagatgtgcaggtatgtcccgcttttacgtcccagctctgaagcatagttcctatggaaaactccagccatgcttcttttctgattgatgggtatgtaactggcattgagcttctagttttaatttctcagaatctattcagttcgcttctgagtcattggtgagctataaacaagcagctaggagaatgtttaattaatgcagtcaactcctgacttatcttatctggtttgtgagtccctttgctgggtttcccatacagggcaggcagattcccaatggggaggatcagccaagttcccacctccccgagccccaaggcatttcagctgagaggcagaggggcttcctgggtctccctgggcaccatcctggtcaagactttgttcccagtcaactcctacccaacttcctatgcttggccaggctgtggcaccagcctcaaagggtagggagggtctctgtgtggggaggctagggaacctggcccacgacggcacacacacacagaccccatggggggcgaatacagagcttgtggggagctgcatctttgggtggccatttgtccctagagatccaaacctggagaggattttggatgagccagcttgttgtcagggctgccagctgcagggatgtctcagaggacacctctgcttccctgacctctagaaagtgagagcagagggagttaagggctggaaagctgcgccttctttaggaagtgggagagagcgctctggccttcacagcccagcagtagcttttcacagcctggctaacctcttcagtagctctccctgggtctgtgagtggtttgtgataaactgcatagaagtcagggccagtgaggctgcttgatgggcttgtgatgctgggggtgcccctggctgcatctgccgtgcctgcctggcgcttcccttgccttgatgatagggatactacccacaggaactcagctttttccctggatgagtgggacgcagagcatcttccttctcccttcatccccacacttacccagtacttgcagtttattggctacaacagccctgtgggtgtggcagggcccaggtaccgtctcagacccaggccttctgcttccaggtccagtgtctctgggcttctccactgcctttctgtacccagggctctcgctgcggtatcttcacctatttagagaacccttgaagagggagcagcctctggccattcagacaagggctgtggagagacatatcagggcacagcaacccatttggacattgattttcttctgcctcttggcccgtgcccgtgggagtggtgagctcccattgaaggatgaaggagtcacccttcttggcttctcagtgcaagaggctggggaaaagccacgttgtattgggaattgcccttccttctgcacaaccacttctacgttttcagcttgccctgaaagcttccaggcctcaagggactttctccagccacatgggcttggacttttcttggggatcctcacggtatcccaggagcttgagcagctgcctcctattggcagccctcacccccaactcctgcccaaaagggtgggctctctcctcgcgaaagggcaagttgagagctcatgagagtggctgtggtatcatcttggggtccaacaggtggactcagtgtccttctagcctggagatccctgggcccaagccatcccatttcctcatcccaggagatgagcagggtggctcatgtgtctgcttgctggtgccttaaggcttcaaagagcaggaagccctgactgtcggggagggggtgtggaacaactattttgggataatccgggttttcctatcattcaagattcctttcttccatgaatgctgctcttctctgaagtctgaggaccttagattgaagtcttgggcctggtagcctgtcctgtatggcacatggggccctggaacaggaacctctcagaccacatggccagaacctcctaaaaggactgagctcccactagaacaacactccttgtgggtttttgctgtgggattaggaaagccttcacagcagaaatccacaaggaattttccagtctgaaccttggaaggcaggttcaggagggcagattcagacctgggcgtcagctccagtcccgaggttgggccaggcgggagcagaaaggaccaaggggctggggctggatgagctgcctccaggtggcctgaattcagctttgcttctgctgttctgctggccacagaagctgcctgcccactgtccctcctgcctgccactacctcccacgcccagcagggtcctgtgcccggcgactatgagatgggaaaggaaactgcttccctcggctttcttcctcttctcctcttctgaataagcttctagcaatacctgggcttcaggaagtcagggagggcctcactggggcataggcgggacctgtatcctgtagcacgatgaggaaatggtggcatgcaggtatcccagattgctgaggagggagggccagtttatgatttctgacgcagtgagtccaactgttggaggggctgcattagcccctgggctagaggtgtgggctgcagttcctcagtcacaaagtagcacgcattagtccccttaatatgcgacttccttctagccactgggcttcataactggcataggcctgactgccacacccttaggcctgggactattttcccaccttcttcacctaggtagctactcctgagctgcgagatccaagctcaaatgcaccttcttcagagagaaaggttggggtcctcattccatgctgtcagagcactatgcaccttttcatgctagtacttgccaaggttataattttatacctatttgcatcttaacattttatttatgaataggaaatactttcacaagctttaaacataaatcattgaacaaattaaaatgtctacaatacgacatctctctctacttgttcctgatccactgtttctttcaacccccagtacaggcaaccatggctaccaatttcttttcagcattttttttttttttttgcacataggcagaatgtgtaatctggaatcccctcttttacacacaaaaggtagcatactatagaaacattttttgcatttgctctgtaaacttaataatatctcttggagaatagtctattcagagagggcttcctcatcccttttgcagctgcacagaattattattattttaatttctttgagatagagtttcgctcttgttgcccaggctggagtgcaatggtgtgatcttggctgactgcagcctccacctcccgggttcaatcaattctcctgcctcagcctcctgaatagctgggattacaggtgcctgccactatgcccagctaatttttttttttttttttttttttttttttttagtagagacagggtttcaccatgttgatcagactagtctcaaactctgacctcaggtgatccacctgcctcggcctcccaaagtgctgggattgcaggcgtgtgccaccgcgcccggcctgcagctgcatagaattttatcaaaatgattgtttcagaaatcatgtagccagttcttgttgaaggaattagatgtttttttattctttgctcttctgattaagcttgtacatatgccattttatgctgtgccaagtatatctgtgagataaatggcctgttcaaagggtacgtggatttgtaactttgaaaatatcaccaaattcccctccatgggagctgtactgatgtatatatttccaccactgctgtggccttaccaataagggcgggagagcaaacttgtggatttttgtcagtttgacaggtgaaatgtggatatcagtgttagctttaatttgcatttcctttattatgagtaaggttaagcatcttcttttaataaatttcctctcctgcgaactgctgttctcatcctttgctcatttttcttgtaggtttttgatatcaatttctaggaactcttataaattaggaggatgtagctcttatctgtgatgagttacacatgtccaggttatcatttgtcatttggttttgcctgtagtgatattcccacaccgatgcttttgattgaattgaccagtcttttccttatagattttggattttgagttattgaaagccctaacccccctccttacttataagggacttttcttttagtattttatggatttatttttacatttaaaccattgatccttttgaaatttatcctggcattgatttgaggtgtgaatccaattttttttttttttctacagagctatccagttgtcccagcatcactaattgagttgtcccctttcctcccctggttgaggtgccttatttctgaacactaaatccctatatgaatgtgtgcctgttcacacgccagtcttttaactgttgagactggataataggttttagtgtttggcaggactgggcctccttgatcttcttcagagttttcttggctagtcttgtctattttttcacataaattttagaataagcttgtagtgttaaaaaaggagcttatttgtatttttattggattttccttaaattataaatttacttagagaagactgataggaaggcttttctatttgctgagggttttctggttcttcaaaacgtattcaggtttccttgaaatggccctgcacgtttcttgttaggtgtgtcacctgatttgttaccatgataaatgcagcctttctttcactacattttctcaccacttatttctgctcattttcggagttactatgtgactgccccaccagatagtaaaccatgaggtttccaatcactgtgacatcctagtgcctagccaccgtgtctggcaagccagcgggtgctggtggatggtaagtgcatgagaaactcctgaagggggtggtaatcagacagcaaagccacttcccctgccaggggcagatgtccccccaaagcttatgctgctaatctgccagtggggacccagagctatttatctccctctttcctcctttcctcccacatttgctgatccctgacaatgtggcaagccctgaactccagatcaggtcccaccctccccagccaggttaaggtatgaactcaggcttggaaactagtaccaattctggctgtgcctgaaatcggctgtctgatgctgggcaaatgcctgcacctccctgaccctcagtcccttgcctgttaaaataagggcaataataattaatgcctactttatacggatactgtaaagattaattttatggtgaatgtaaatggcttagcacagggcctggcacataagctatgctcagtaagtgccagctgttactgctgttgctgtggcagaaggcaggaaggtttggaggccccacggtaccaccccagtgttgctcgcatgggagtgatgcctaaggttccctgggcaaggcctcttgagtgggctgatgggctccctgacttagatctagtttgaattttccttggatgcacctcttatcatccggggtctcagttttctttctttccttctttggtgtttaagctgagatcctgtcactgtcctaacctctttgtagggctggggaggatcagaaggatgatggagaaggtagtcacagaaaataaaattatgatgcagggtaaatctggttttagtatctgacaaaatggacattagccacacttttgaggggctagcatccagataacatgtgttctgtgttctgtagggcctgctgacccaagtcccttacagtgtttaattggcaccttctcattaactctgagcttgttgagagcagtgtgtgctctctcacaggccatctggatcctgctccagactgtgtctccaaccagctgtgtgttcctgggcgagtcacgtctccactaccagcattctgttcctcatctgtaaaattagagagctggacacgaatgatctcaatggcctgcctctccatgccctaatgttctgtgattccaatgtagatagatctgggctttattggccaagcacgctatggcgatctcttgaggagagggatgtttggcgcaattgcagttgttaaaatagaacaggcttctgaattgtggccagaacataatgaatcccatttctgtgaaacgatgatgacggaaccagtcatgtagtggggttgttgacgtggctggcccatttggccccatatcctctgcagcaaatataaatgtgaaactctggcaaagtagtttaatgtggcgcctgaggaacttccgagcaaagccaggtgtgtgagtcactgagttggtttcacattctcccggctgatgggactaaggctcaagtttatacttgtcttggctcaatgggtgggactttcttccagatacctgtccaggttctagactgtcggagtcagaaggggtgtttgggaccacttagtcaaaggccccacttcatagatggggaccccaatggttggagaaggagaagagcttgctcaggacttgacgctggtgaacagagatcatgacggcgtctgcacccttcttgacttctctatgaccggggttaccctcacctagtggctcccacctgcccctgtaggactggcagcttccctctttgcaggtttccctgtgagcctggctggttccctgcctcggaagatgtgttgggcactctctccaccctagtcatcagggactttgtctgacgggctaaggagtttggcctttattccaagggtcaagagggaacaatcaaaggtggattgtgtacataaggcatttactgagccccatatactggcagcagtggtaggaggggatgtgggggaaagaggaggaaatacaaaaggccctgctcttaagcaatgcacatcttcctgaatttcccagaaggttctgagcaggggagtgaactgatgggatgtgtttcaggaggaaatggagagaaagtagatggaggtagggggaggctgtcctagcagcccagccaaagatggtggggcctgaagcaggggtgtgcaaaaggaatggaggggcttttgttttatagatagagtcacaggaatcggtcactgagtggacctggaggtggatgacagtgaggaggaggggagttgatgatgatacccagggctttgacgagcccacgactgcttgtgactgcccaggtgtcacaggagcagggtggctgctgccatgtgtcctagtgtcctgcacagccttcatgaggtgctggtgcctatggctctgtcctgggttctctcagcccacggtctttgttctccctttgcgctgccacctttggagagctagagtgactgggggaggccttcatgccaaggagctggcacatcggggaactcatgggagatcatctctgcacatgtttcatcaccacttttgacctaggaaatgccttagagatgatctcgtctttagtgagcaagcaaagaccagagaggaggggacttgcccacgttcccacggagggtttgtggtcgtggcccagatcttcccactctcaaacccgaccttgcactcactagatcctgtctgggggcaaaggagcctggaggtacaaaaggataaaaggtatagccctttctcctgaggagtttagagtttaattgaagggacaagaagaaataggaagccactaggatgcagaatgacaaccaggtagataacacatgagaagtaagtttcagaactgggcgttcagagcaggcccttgtacctgagacttcctggaagatctgggtcttcctagaagagatgttaggcccagaaggtgagaaaagaatgggaaaggaagatcgagacagcagagggacctgcatgtgcaaaggtgcacaggtaggaactgggcattcctggagctatcgggccacctcccaggtattccattgctggatcttccgggaacgtgggtcctttgtggatgcctgcagctctgtgaatagtgcacggtgatggagtcacctaaaggggctgggaggtgttttccaggcccagttcctctcgccacaggagcatccccagcgtcctggaaagggacagacatcgaggcctctctgagcgggacctgtgtcctgtagcctcactctgcattcctcacctggcaggcccccagtcgggcagcaggtccccagctgcaggacctggtttggggtttgggagttatgtacttgcctcgtgaaggtctggaggtttgtcactgagggctgaggcgggagtggccagtgcagaaggcagaaagtgtggttcctgctggatggagtcacccagctcaaccgaggagcccagggaaggccagtacccacagcccaggtcctggcccacccattcctcagctgagctggctctctaggctatccctgtgccccagggcacgataagagcagagtcttcccagactaagactttggccaaggtttgccataaaagagcctgactctggcctttctcttggcactctggtcactaacaggttaaacctttcattcagcgtcagtaccaggtcccatccctgggaacctagaagggtggcagcccaacgaccaacccaaggaaagggcactgccagctacggagaggggagctcagaggggaaggggacccgagggcccgcctggcctggccaggacagaaaccgaagggttaacagaagccgcagggctgataaaatgccccaaattcctggtcctgccttcaatggggagggcgtctggcaaatgtcaacgataaaaaatacattttaatggcacatgatgcagctgctaccgtggggcgcagccaaatgaagcaggtttggagcagcaactactgtgagcggcccccgggggctctggcagccgcgcctccagggcgctttgctaagctttgtccagccgcggcaacccgcctcccccagcccacggcatcctcaagggcccttgggatcgggggcctcttgccttctatggcactattttggaaactgtgccgtctcctaccttggcaccttgaacgcttgaagagcttctctgagggctgggagcggccttaggcaggtctgaaggcaggatacatttgggtctccccagcacaccgtcagcaggcctctgtgaacgttgagaaatgcataaacaaggctaggtgcggaggctcacgcctgtaatcccagcactttgggaggccaaggtgggcggatcactggaggtcaggagttcgagaccagcctgaccaacatggtgaaaccctgtctcttctaaaaatataaaaattagctgggaatgatggagcacacctgtaatttcagctacttgggaggctgaggtacgagaatcgcttgaacccaggaagtagaggttgcagtgagccaagattgcggcactgcagtccagcctgggcaacaagagtgagattccatctcaaaaaaaaaaaaaaaaaagaaaaagaaaaagaaagaaagaaaggaaagaaaagaaatgcatgaacaaatgagcaatgtgacaaaaaaagttacagtgggacattttcctcagctttttccctctctctcatcctgcaaaacccaagtatttctagaagaggcaggtcatgtgtaagaagggtattgagaagaggtgaggctggagggggacccctgagggagggaggttacatgttatgatcccatttacaaatgtggaaactgaggcacagagaagcccagtgacttgtctgagatcaaacagtgactcggtggcaccctggacttttgctgacagctcacaattccacctgctacactgtgctgagttcacagtgggctttgacagtgttaagggctgactcaagttctccattaccacagtgaatcaactggtcacatcaaggagggcctggagctgggcattagtgctggtgcagagaggctaagtagggctggggtggggagagtttggggcccaggggcctggttcttcacttgggagctccagtcctggtcggtaggccccggatcctgggctttgaggagaatgagaaaaaccaggccagggccagaagaatgaggtcaagggcctggggcttgcggatggggacctggagctcagcatgagacccttctcttccagatcatcctcaactctatgcacaagtaccagccgcggctccacatcgttaaggctgatgagaacaatgctttcggctccaaaaacactgctttctgcacccacgtgttcccagagacctccttcatctctgtgacctcctaccagaatcacaaggtacagccactgccccactgccccacagccccacttaacaccaccctgcgttctcttccaccaggcagagaggcagagtgtgaagccagagtcccagcagggcttgggcaggcccagtgcagggacctcagaagcctagagtccctcggagccgcgagcaaatcgaatgatgaacagaaaaggaccctagatatgtccatctccagcacagaggaattacggtctctgtgttttggggaatggagaaaattggcaactgtaaaaaccaggagcttggagtctgccttgtggtttgagcattgggccctttcattccacaatgttctttctcctggttcatctcctggtgccttcagagacaggggtagggaatggggataggagccctggggtgctgtcagctggggtgtggaagcagagcctgagcggaggcccttcccaggctgtgataggaggtgccccagccacctcccacactcactactgccctccccagcccggccacccccactgcatcccagtcactgacagccgtgctctgccgcccgtctgctttccacagtatgcacacagggactggcaaggtgggcaggggtcactggggaagggccgtggctgtggtggattttaggcagaagagtgacagagtcggaactgcatctagaacggtcactcagagcctgatgtagttgcacagactcaggcagcaggcccgggatgctcactgggaagatgttacaggtccccaggagagacccatggggacagaagcccggcagtgcggagggctggggagcaggagaaagaatcagagggtggagagcaaggagtagggagccagggacaaaccaggtgtgaatggcaaggcccacttccccagacctgccccagttctgcctgtgcctggggttggggaggagggaaggccagaggccagtccagtcccaccctcctccccaaggagggtagtgagaagcggtgaggctggagagcgacccctgagggagggaggttacatgttatgatcccatttacaaatgtggaaactgagacacatttgtgtgcctcacactggtgaccctatgtgttttctccccacagatcacccagctgaaaattgagaacaacccttttgccaagggattccggggcagtgatgacagtgacctgcgtgtggcccgactgcagaggtggggctgcgtagcctgggggtggggcgggcagatgggattcaggcacgtggcctctgtgaccctcgatgtatcttcactctcttcctgtctctcctcctgtcctccccaccccttcagcaaagaataccccgtgatttccaaaagcatcatgaggcagaggctcatctccccccagctctcagccacaccggacgtgggccccctgctcggcacccaccaggcactccagcactaccagcacgagaacggggcacactcacagctcgcggagccgcaggacctgcccctcagcacctttcccacccagagggactcaagcctcttctatcactgcctgaaaagacgaggtagggctctcctggtctagaagccctagagggtaagaggagcggtgaggttctccccgaaaccactctgcagcgcccccccccccaacacacacacactcatctcgtgcttgtgtggcctgggagagtgggcctgaagggttagggatcacagctgggcgcagggccatcttttccagtgcagggatgctggttctcatctctcatgctgcctttggaaccctcacagacagcttgtagccccggtgtccccagacacctttccaagtgttgctttgcagtcactgctctgagagcctcgtggggtgagctgggctctgcctggaagtgcaggaagaggctgacacttcccagtccagaggttttgggattggggctgttgtttgtcaaagcaacctcaattccagaacagggaggacttggtgtctcacgtgcagggccttccacccaatcattccttccaggatctgcagaggctgcttgagagttgagatgagctattgtggatgtaggtgggggctgggaagacaagccacagcaccctctgtgccaggcctcttcgtaaagaggaggagcccggagctgggcaccatcacatctgtgctctgtgccaggtcttgattcctccatggatagaattgcaatgattcgtgttactccaccagaagacctcatggggctgctgaaattcccttcggaatgagcctggggacttttgcttgccttccggaatgttccctcagccctggtcctagggactagcccagcagagctccgagatcccctgtacaagtctcattagaactcaatgacctagagcacgggttggcaaactgtggccttcggacctaacccagcctgctacctgtacaaaatagtttttacatttcaaaacaattgaaaaaaatcaaaagaatatttcatgagatgtgagcattatgtgaaattaaagttttagtgtccataaagttttattggaacacagccatacccatttacttacaggttgtctacggctgctttcatggtacaacggcagagtttcgtagttgcaacagataccctgcggcccacaaagcctaagatatttactatctggtcctttgcagaaaaagtttgcccagtcttgacctagagtgagtaggccacctgccaggatcaagagcttagctcagggagaagagagggatttggagagaagacggagaatcgggctgagtgaggggcaaaggagagagctgggcaagggagaggagcaggtctccctgggcagggcagatgccaccagcaggggcagaggagagaggtgagcagaggccttcacacccatttagcccctctgcttccagccccgtgggtgcacacacagagctccccgaatgaatccctggagaaaacaggaggagggaggccaagatgagccatggatgtgtggggtttttgttgttgttgttgtccttgttttgagacggagtctctctctgtctcccaggctggagtgcaatggtgcaatctgggctcactgcaacctctgcctcccgaattcaagtgattctcctgcctcagcctccccagtagctgagattacaggtgtatgccaccatgcccagctaatatttgtatttttagtagagatggggtttcaccatgttgatcaagctggtctcgaactcctgacctcaagtgatccgcccacgttggcctcccaaagtgctgggattacaggtgtgagccactgcacccagcccggatgagtgttcttaaattggctcagtgggctgctccccaaaccctcaggcctgggtcagccctggatcccaggggaggtcatgccactccagatacttaggccctccttgtggaggatgtcgaaaggcacacatacatgatttgtggcatctgatgtcatctttccccagagtatctgcttagcctgaaaagtatgtcacctttttcacttattatcagttctatttcttaatttggtagacactgtggtgttggaatctgtgtagtaaaaatctgatggttcttctttaaacacatgtgaggttagttcatcttctaaaagcaacagaaacatgcctacaagtggctttggctccctgaggtcttcctgggagctgaggatggaggcagaaacctcatggccttaattttctggctacttcagacagatgtggcctctgggcatgggctggcctggcaagtgcctctactttccttggccagggagggcctagcctgagaatgccactgcacatcagggcctctcactctgcaagagtcaggctggcgaaggatcaaagccgagtgctgcctggctaagcctggccctcagtgtccggtgatgtggtgtcccccgtggcctctgagtagggtccgtaatctgaccacttcttggtgcctgcaaccctataaaagccgtggctgattgaaatggctctgggagtgccatggcaacatggggagggcgggcgcagagggacaaggacaggctgtcccagcatccaacagggtgctctggggcctgggctggtggaaatggttcttcctgaatgttactttgtctttcagcagacggtacccgccacctggacttaccttgcaagcgatcctatctggaagccccctcttcggtgggggaggatcactatttccgttccccccctccctacgaccagcaaatgctgagcccctcctactgcagtgaggtgacccccagagaagcatgtatgtactcaggttcagggcccgagattgccggggtgtctggggtggacgacctgcccccacctccgctgagctgtaacatgtggacttcagtgtcgccgtacaccagctatagcgtgcagacgatggagactgtgccgtaccagcccttccccacgcacttcaccgccaccaccatgatgccgcggctgcccaccctctccgctcagagctcccagccaccaggaaatgcccactttagtgtctacaatcagctctcccagtctcaggtccgagagcgggggcccagcgcctcattcccaagagagcgcggcctcccccaagggtgtgagaggaagccaccctcgccacatctaaatgctgccaatgagtttctctactctcaaaccttctccttgtcccgagaatcttccttacagtaccattcaggaatggggactgtggagaactggactgacggatgactctcacgtctcctccatagccccgggaccgtgttgctccagtattaacctctgtgggtggcctgcactctaccaagaaacacaggaaggtattccagtgtgtgtgtgtgtgtgtgtgtgtgtgtgtgtgtgtgtgtatacacgagcatgtatgtatttggagagcatccatcttctgacatacaactgaggtcatgacaaggaaaaaaaacaccacatttatctaagaagtgattttggctgcaggacctgggtctattgttatctgacatctcttgacatgcccgtgggtgggatgggagtggagggttcatatgagttattgagagggttttataatggttgatttactcaggggccaggtggggagttctctcccatggggaaagattctcactgctggggtgggaagattctcgctgctggggtgtgaggactctgtgcacaccttagagttcctggccttctctttgcaaggggagctgagaatctggttttggtagcaggaggcccactcctttgacttctggagagtctgtgagactgcctgagaggtgggctcagctaagccacaatgtgtactttgatagtacagctggctgctcagtgagtggcctagacattgatgactggagctctgaggtctgagggatgacgttcggaaagggtcatgggctaaatgtcacctgaggggtatttttaaagggtttttttttcccttcaagaggagggaaaatgcaaccagtagcatctctgtcatcattcagattttgtaataaagtacagagcccttccccctaggtccccaacatacagtctctcactctggtgtgtggagagtcagcctcccaggcaccataccatctgcatcctatgatgatgggcaattatgaaacacgcctcagctggcatcatccccaggaggccacactggagctgatgtctggcatctccagggcctgttctgctctcagaaaatctacgcttctggagcgagaaaggccaacagaaataaagatagttgaaaaaaatttgtttcttccagtaaattcagccggtgagctcagaggagcaaagagaattctccagtgtggcgctcacaaagtcctcagccctgcgttttagcattgaataccaccaggccatcagtgtggctggggtgaactctccatcaaacttgggaaatcactaaactctttgcatgctgaatagctatttatatattatataaataaataaatatatatattatatatcgctctctctcacaaatgcaggccacatgtcaaattcagctttgctttctacaaatgaatgaacttaataaaaataaacgttggagggggtatttggaaagacatctatttaaatttttattacatgtttgatattaaaaactaagaatggtttagataaaacatataaataaatatatatatatatatatatatatataaacacacacacactacagataaggcttttttagaaaacacattagctaacaggtgatatggaacttcaagtgttttgttatatagcatggatgttttattttgcatatcggaacataaagccattttacaactgtgaagtgtgtggatgctctttattactgacttgtcatttcttggctctgcaacggcctctgcctcttttttgctggtattctttttctcaagtgtcaggtaaggccctcagtacctctgaacatgtgtaccgtggagcctctgagctcacagtgaagtcacctaggaccacagagcaattgcacctttgatctcatgctactccctgggttatgaatctggactccagggtccacaaagaccccagaagggcgggcaggcagtaaagcaggaatctgtctcctttcagcagtcaacacataagctggccatttgggggaagtggtctcgtaagtagggaattcctggtgggatttatgcagctgcttcagaaaaggaactgaagagcaggtttgagtcagtgcggggggcttcctggagcagtcaggggcatgagctcatcaccaccatcaccccagaatgggtgagtcaaggcctggcaaagtccccattcgcctgcacctttgccaggtccctaaagcttggccacaagatggagagaggaaaagcaaggtgaaatccagcccaggttcaccctagattggaagaggcaggcataggaaggc

SEQ ID NO: 43 - DNA, 11547 bp, Homo sapiens
gctgcccctccttccacctctttccaaacccaccgagcggcgccaggaaaggtcccgccgccctcttctcccctcccccaaactaggggctggggaggcccaaggaggttaacagcttccgttccttccccgcctagaagggaaggggtgggaagtgggattgcgagctcgtcccgtctcggcctccctcgccctccacccttacccggagctccgtttccgccccagcccgagactcactcgtcagtcccgcagccaccgcagccgggtccccgcgtactgccacagcccctatcccagggccgcccccccacccccagctgcctgctccggtgggttccggggcagtcgaaagaattacttccgctgggtcagagccgctttcggcgacgcgcgggagatccgtacctggtgaggcgaggacgcagagtgtgtcgctcacttccgtctggaggtagggcgtagcgccctactcttttcccctatagtaggccagcctatgaacgcaaccggcaaatttcgaccaatccgagtctagctcttctggattcccagcatgcagcgcagaccctgatccaattgctgtaaagacgcatccttagagaggctctcgggagtccgagagagcactgcattctgggatttgtagtttctctggtggataccgtcggcgttgggaccgaggcagccctgcatcctgggacttgtagtttctcgcactgcgtgttaagattttggtggttacagagactgtccgtacctctcatttagggttacgcctggaggtgggagactgctgaggaaagattgaaacgtgggagggcggtttctttgctaacgagatcgtactctttatgaagcagcatctgtccctggtgaaaagttgctgtgcgtgctgaagagccagcacagcaacgactagcgcaatcggctggcctcatttcctctcttcccggtagaattcaatgttaactgaaaactaaccacgtcccccactccacccgcgagggtcctgcctttgcctctgggttagctcagctgtcctggatccggagctcacgcacagaaaatccaggcgcctgccaaaccgttactcagtttttgggaacttctttctcattccacgccccgcttcccacccccccgcgtttcctatggtaagatatacaggcacctttccaggaaggctgaaacagctaaataaagttcaccttctactgttttccaggagtgtggcatgaagagaatgtatgtagggccaagacaacattacaaggtgctcaacgaggcactttgtgtgctcaaaaaatagataacaggctatctagagtttgttgaactgaggacttgccagaaaggctttttttttgtttaatttagttaatttggtagataaaagacattggttttttataattagttgcaataatcaaggagattgtcttggataaattttttaaagcctttacagaaatcagaacaaagattttttggctgtaatggtagctcgaagtagagtttggtggggaggacaggcatggaggtgcagatgaggaggctgtaggccccttttcttttctcttctcttttctttccttcttttttattgagagggtgtctcgctctgtctcccaggctggcgtgcagtggcgcaatctcggctcactgcagcctccacctcccaggcccaagcaattctcgtgcctcagccccctgagtagctgggattacgggtgtgctccaccacgccgggcgacttttttctgtgtttttagtgaagacggggtttcaccatgttggccaggctggtctcaaactcctgaccacaagtgatccgcccaccttggcctcccaaagtgctgggattacagccgtgagccactgcgcgcggcctaaaaacatccttaaaatcattctaaaatcccattagtttatatttaacaaatgtctctaacttactggaactggaaaatccatctaacataaataacaattctatgtaaatctatggtacagagttttcagactataatctgattttatctatttagaaattttgagaaatagatcaaacaaaagtttttattttcatttacttacagtatttgtagggggaacagctttacagaagataaaaaatttgagttctcttaatatagttaagaaaaacatttttatgtgaaaattttaaatatatcagcaaaataatagagtgaatattgattgtgagtgaattaccctaaacagaagagtttttaaaatgtaaataggccaggtgtggtagctcaggttctgtgacactttgggaggcccaggcgggaggatcccttgattccaggagctcaagaccagcctgggcaacaaaaggaaaccctgtatccactaaaaatacaaaaattagctgggcatggtgacgtggcctgtagtcccaggtacttgggaggctgaagtgagaggaacacttgagcctgggaggtcaaggctgcagtgagctatgatggtgccactgcactccagcctgggcgacagagcaagaccctgtctcaaaaacaaaataaaaggtgggcacagtggctcacccttgtaattccagcactttgggaggctgaggtgggcggatagcttgagcctcaggagtttgagaccaacctgggctatatggtgaaactccatctctactattaaaacaaatattaaaataaaaataaacaaaatgtaagtagaagctaactttttataaaataaagttatccatatagaggtattatcattatctccttctgaatactccccccaatagacagtatttggagttgccaacatgatcatattctattgatttatttttatttttatttttgagacagggtctagctgtgtcactcagtgcagtggtgcaatcagggctcactgcagcctcaacctcttgggctcaagtgatccttccacctcagcctcccaagtagctgggactacaggcaggtgccaccatgcccagctaatttaaaaattttttgtagagacagggtctcactttgttgcccaggctggtctcaaactcctggaatcaagtgatcctctcacctgggcctccacgtagtattggaattgcaggcgtgagctcccgcccctggccacacattattttagactatgaatttgttcctctccggtgcaaataacatgtcaaatcaaaaacatgtatagttctgcagtggtaaacaaaagtgtgtttctattactaagatgctcatccttcaagactgagctaaatgtgaagccagtctgaagacattctgaggcaaaattaatcatgttcttctttgtacttctgtggcatttgtttgttcttttttttgagacacggtgtcactttgtggtccaggctggagtgcagtagtgtggtcttggctcactgaagcctcgactttgggctcaagcaatcctaccatgtcagcctcctgggtagctgggaccacaggcacacacttaccatgtgtggcttatttttgttttaggttttttttttttttttttttttgtagagacggggtctccctgtattgctcaggctggtctcaaactcctggcctcaagagatcttcctgcctaaacctcccaaagcgctgggattacaggtgtaagccaccacggccagccacattttgtatattgcggtgtctcaattgtattacattatattctagccaattttcaggtattttcctccactgtttaagcactgtggattcccagtttaatctagtattttgtatcctctgctcctagctcagtcctggcaatagattcagtacctctttaacaagtaatgaatcaatgtgtatatggatgtgaatgatttccgaagacaaatctggtaacacctatcaatattacatgaacaattccatttattttcctccaacccgatgattcaattaagttatcactcatttttgttcaaatcgtatattctttcttctgtgccaacaggctagaatcattttccgcaaaggaaacagtttttagtgatgtcgtccacgagaaaaaaaaatatttaaccctggcttctgggcattgtcattctcgtacagccctctgcccctccacactgttataaagaaggtaaaattctaggaaggaggagccgctgagccaaggacagagcggcgggctcccagctcagctggcggataacgcgcgcggccgggaaggcggcaggcgggcggcaggcgggcggcaggcgggcggcaggcgggcggcaggcgggcggcaggcgggcggcaggcgggcggcagattctgcgcacgcgcaggcagcccagctgccagtcaggcgtcccgggctgggcatgcgccacttgtgcggcagtcgggtgggaagccgtgtctcgcagtcgtggactcgtgcagctggggcgtccgcagccgctcgtcacccgcgtgatgctgtttctggcgttgggcagcccgtgggcggtcgaactgcctctctgcggaaggaggactgcattgtgtgcggccgccgcgctccgaggtccccgggcctctgtctcccgggcgtcctccagcagcgggccttcggggccggtagccggctggagtacggggccttcgggagccgcgcgccttctccggcgtccgggtcgagcgcaggtagggcgtccgaggtctggtgtcccaagtgaggcggggagggcgggcgtcgtgtcgggcctggggagccccagcggctcttcgcgacctctcccaggtgtccgtggctggagcgcgggaggagccccctctgcggggcttgcagaagtagcaggccgagggccccggggtcctcagcctccgcgagtccaggagaacggctggaaagtgcttacttttatggtagttccaaatccagagggtttgtggtgacaactatatgtagttccttttctgcccttgagtagaagcttagaagtgttaatttgcaaaaaattggatgcagcacctggaaatagaaccgaaagagccaggttaacctgactttgagcttgttctacttttatgaggtggctgtacttttaagaattactttggtccctgggaaaagggggatgcagatgttaattcttttattttgatctgaataaattgtcttctaattctactctgtaaaatatcaggattggcaaacctggttaaaacttggaagaaatgcttaaaatggaaattggaatctaattacatttcagcattgaggaattaggcatgccttttacattttgaagtgtatacactgtgaaactcattttcagatgtatggggaacgcttctgttcccttgaaatttgatgtaggatttcaagtaaattttatttctttttttttggaggtgaagtctcgctctgtcaccctggttggagtgcagtgacgtgatcttggctcactgcaacctccgccttccgggttcaagcgattctcctgcctcagcctccccagtagttgggattacaggcgcgctccaccacaccccggctgattttttttttgtatttttagtagagacggggtttcaccgtgttggccaggctcgtcttaaactcctgacctcaaatcatcctcctgcctcggcctgtcaaagggttgggattacaggcgtgagccgctgtgcccagccaaattttatttcttgtcaagaaataagaggaccaggggatacacggtatttacaaggtctttagagaaagatttgatctctttaatactatcatataaatattttagcagtatttgtaaaaggcctggactttaaatataatgtgagtttgcggagtattttacttaaattattttagtaaaattaaattttatttcttagagatggggtcttgccatgttgcccaggctggccttaaactcctgggctcaagtgatccacctcagcctccccagtagctggggctatagacgtgttccattacaccagctaaatgtatttattttttgaaaaggtgttgcatttaaatagaatggaaatgatgtcgtcattaacagtggagtagaagaaactgttactatttttacttgttcaaggtcacactagacctagaaacctgagagctgggatgctaagctaacaaactccagctctgcagttttctacttgtgactagaattaaggcaagccattctgtcagccaatttatttctttaactctgtagattatttgggagaattccttatgtcacctcatgtgacaagttcttttcattacaattttattttatttttttgagacggagtcgtgctctgttgcccaggttggagtacagtggtgtgatctcggaccactgcaatctccgcctcccaggttcaagcgattcttctgcctcagcctccggagtagctggattacaggcgccagacaccatgcccggctaattgtttgcatttttagtagagacggggtttcaccatgttggccaggctggtcttgaactcctgacctcaagtgatccgcccccctcggcctcccaaagtgctgggattacaggcatgagccactgcacctgcattacaattttaaaaataaacttaagctgggcatggtggctcatgcctgtaatcccagcactttgggaggccaaggtggcagatcacttgaggtcaagagttcaagaccagtctggccaacatggtgaaaccccgtctctaataaaaatacagaaattagccgggtgtggtggtgggcacctgtaatcccagctactcaggagactgaggcaggagaattgcttgaacccgggaagcagaggttgcaatggtgagctgagatcgcaccactgccctccagtctgggagacagagcaagactctgtctcaaaaaaaaaaacttaaaaaaatttaagaaggttagttgaccataatgatccctgtttcaatagatccctgtttattgggaaggatatgttcgattcttaaatacgccatctgacaaatcagaagatggaaggctaatttatactggcaatatggcccgagcagtgtttggtaagtaattggaggtgggtgtacttactttgtttttttctcttttaattgtaaaaatatccttaccatatcttacttgttgttatggcatcccttaattacaagacgtaaggaaaattagattttcatttttttttcttgaggtgtgttgataagatgtagagacctttgcatttttagatttttatttgagacagagtctcactctgttgtccaggctggagtgcagtggcatgatcttggttcaccatactcttcgcctcccatgttcaagcgattctcctggctcagcctcctgctgggattacaggtatgcaccaccacacttggccaatttttgtatttttagtagagacagggtttcaccatgttggtcaggctggtcttgaactcctcacttcaagtaacccacccacctcggcctcccaaagtattgggattacaggcgtgagccaccacgcccggcctctattatgttttaatatttcgaaggggtaacttcccctcattgctttatttttttattttttgctgcttttgtttttccaaataaactttataatcaacttgtttaggatctcaactttattttccaaacagatggtattttttattaggatcgtattaaaattataaattaaaggtaaggtaaatttacattttaagtcattttttattgtggttagataaacataaaatttttcactttaatcattttgaagtatacagtttagaagccattttttaaaaataatttttattttttagagacagggtctctgtcatctaggctggagtgcagtggtgtgatcatagttcactgcaacttcaaacttgtgggctcgagtgatcctcccacctcagcctcccaaatagctaggactacagacatgtgccactacacctggctgatttttttttttttaagctagtcaaatttagcagtggggacattgtataccaactttagtgatgccagtgttaagttctgataactcattaccatcagaccagccttggctaattaaaaaaaattttttttgtagagacaggtcttcctatggtgcctaggctggtctcaaactggtctcaagcagtccttctgcctacaccttccaaagtgctgagattacaggcatgagccactgcactctgctagaagtcatttatttttaatctttctaaggtaataggtaaaaatggtatctcagtgttttttttgtattttttattatttatttattgagacggagttttgctcttgttgcccaggctggagtgcagtggcacaatctgggctcactgcaacctccacctcccaggttcaagcaattctcctgcctcagcacccccagtagctgggattataggtgcatgccaccaagcctggctaatttttgtatttttagtagagacaggatttcgccatgctggccaggctgcttatctcattgttttaacttgaatgtctttccttactaaagaaattgaatacctttcccatatgtttctgttttttttttttgagatggagtctcgctttgtctcccaagctggagtgcagtgtgcagtcttggctcactgcagcctctacctcctgggttcaaggattttcctgcctcagcctcctgaatagctgggattacaagcacttgccaccatgcccagctaatttttgtattgttagtagagatgggagtttcaccatgttggccaggctggtctcgaactcctaacctcaaatgacccacctgcctcagcctcccaaagtgctgggattacaggcatgagccaatgcgcctggccgtccgatatgttttttaaccactggttttatttctctggtgatttgctgttttaatcctgggcacttagcctgatagaatttcccatgtttgaatattttatgttagatatactggagtgcttgttaatagagagttttgtttgataatctgctatctgaatcaacttttgtagtacaatattagtaaggatctttaagtaatattaactactttattgtggaactgaggtagggccacttaaaccctaaagcagatttcctgcctggagaggcagtgcattctaatggtcagtagcagggacattgaagtcaaaatatgtaaagtccttaaaacagagcttagaatataataagcactgtatttatggtttgattttgttgtcttgagctgatacagtaagaagaaaaatggaagaattagtgggatagattgattcttttataaaatttaaaagtattgatcctctctctttttttcccatttaggtgtgaaatgtttctcttattctacgagtctgattggccttacatttctgccatacatttttacacaaaataatgctatttctgaaagtgtgcctctgcctattcaaatcatattctatggcatcatgggaagctttacggtgatcaccccagtgctgcttcactttattacaaaaggctatgtcattcgattgtaccatgaggccacaacagacacttataaagccattacctacaatgctatgcttgcagaaacgagtacagtgtttcaccagaatgatgtgaagattccagatgctaaacatgtatttaccacattttatgctaaaacaaaatcactgttagttaatccagtgctctttccaaaccgtgaagactatatccatctaatgggttatgacaaagaagaatttattttgtatatggaagaaaccagtgaagagaaacggcataaagatgacaaatgagcctatttgttagtgttcgtgctcaaatgtgatttacgttttaatgtataataataaaattgccttttgcattccgttagtgactgattgttaaaaataatttgaaattatcaaagcttttaatttccagagaatgatgtttgtttataataaaacaagctatgtttgaaaaccaaaatgtagtatctaccattcgtgttttagaaaggtatgtgaataaatatgttcatgctagtataagagttctgtgttactgtggttgactctaaactggggatctgatgtcagtagcaaatgggagagttgctttattctttgtgtatggatttttctaagtgtataaatattttccgacattaaaagacattttctctttgaggaagacacagtcataggtggtgcggagctgtggtccacctgctcctgctcctgactcactgctctttgctgttgcctgaggaccaagtctgtcaggaagctggctaggaagccttgcagcagccatggcttttaaacataccagaaaaacacccgtggagtcagaggtggcaattcaccgaattcatatcactctaacgagttgcaacgtaaaatccctggataaggtgtgtgctgacttgatctgaggagcaaaggaaaagaatcagtgaaaggaccagtttgaatgcctaccaagactttgagaatcactacaagaaaaacttacggtgaaggttctaaggcatgggatcgtttccagatgagaatccacaagcgactcattgacttgcgcagtcctcagatagttaagcagattacttccatcagtattgagccaggagttgagatggaagtcaccattgcaaatgcttaagtcaactgttttcataaattgattaccagttgttaaaaaattttcaaaaaaccgcaaaatttcaagaaattcacaaattatgggagcagttttaagtcttctttggttcagaacacaggtttttgcctaacccctggcatgattgcccataagaacatacatgtacagttgaactggtggttagctatacgggaaatggtaagtagtgttgtcttcagtatcttaatttgtttctgcaactgtgcactcctcccttggtggcaccctatgggtgtaggaaaaccactgttattaaacaggtgaaaaataccttgtgtaaaattgctgtctctatgctagctttgtcaagaatatccattgtaagatttttacctctattgtaaagtggagattgactcttgccaaggatttttagccaggaacaagaggcctcaaaccacactatttagatcagtagatatttactaagtgcccagtactgtgctagttactaagatcacagttaagaatgaaacaccccgtctgtctttatggagctacctaacattgtctatggccaccatgatagtaaatttaaactttatggcgtacatgtgtatgagggaggttgatggggaagcagcaggaacatctgttcaaagagatcattcaactcccaggctgctcgaaacttattcataggagataagacagaaaagctgtctttctgagacgtagagcctgccctctgcttggattgtccagctcaccagactgagaattcccaccgccattcctctgtgccatcttctgctcaaggtgggtttttgcctgcttgcttctctgtcctttgtcccctagatgtatcctagcaatgaatgagagatgtgtttctatttttttcatagcaacctactagataagggaagc

SEQ ID NO: 44 - DNA, 21 bp, Artificial Sequence
  Primer
ttcaaggtgtttgtctgaggg

SEQ ID NO: 45 - DNA, 20 bp, Artificial Sequence
  Primer
ccagagcatgagaggaaagg

SEQ ID NO: 46 - DNA, 20 bp, Artificial Sequence
  Primer
ggatagagaagggggctgtg

SEQ ID NO: 47 - DNA, 20 bp, Artificial Sequence
  Primer
tagccaaaaactccctcacc

SEQ ID NO: 48 - DNA, 20 bp, Artificial Sequence
  Primer
cccagtgtgtaaccctcacc

SEQ ID NO: 49 - DNA, 20 bp, Artificial Sequence
  Primer
ggaggtctgcaaacttgagc

SEQ ID NO: 50 - DNA, 20 bp, Artificial Sequence
  Primer
gctgagtcacccaacctttc

SEQ ID NO: 51 - DNA, 20 bp, Artificial Sequence
  Primer
agacaactcgtggggtcttg

SEQ ID NO: 52 - DNA, 19 bp, Artificial Sequence
  Primer
gatcccaggtttgggagag

SEQ ID NO: 53 - DNA, 20 bp, Artificial Sequence
  Primer
aacaggctgattcccctttc

SEQ ID NO: 54 - DNA, 20 bp, Artificial Sequence
  Primer
tgtctttcctctcgctctcc

SEQ ID NO: 55 - DNA, 21 bp, Artificial Sequence
  Primer
accagcacacaccacactcac

SEQ ID NO: 56 - DNA, 20 bp, Artificial Sequence
  Primer
gtgatacgggcaggatcagt

SEQ ID NO: 57 - DNA, 19 bp, Artificial Sequence
  Primer
atttccctggaaggcatgg

SEQ ID NO: 58 - DNA, 20 bp, Artificial Sequence
  Primer
tagcttacacgtactctcac

SEQ ID NO: 59 - DNA, 19 bp, Artificial Sequence
  Primer
catcacgcctggcttcaac

SEQ ID NO: 60 - DNA, 20 bp, Artificial Sequence
  Primer
cagagagctgtagcattctg

SEQ ID NO: 61 - DNA, 21 bp, Artificial Sequence
  Primer
gctggagtacggctgtacaat

SEQ ID NO: 62 - DNA, 21 bp, Artificial Sequence
  Primer
cgcattttttcctctatatag

SEQ ID NO: 63 - DNA, 22 bp, Artificial Sequence
  Primer
ttcctgttgtgaattttgaacc

SEQ ID NO: 64 - DNA, 22 bp, Artificial Sequence
  Primer
ttcaggaagggcattttatagg

SEQ ID NO: 65 - DNA, 23 bp, Artificial Sequence
  Primer
catcctgctgctaataatgtttc

SEQ ID NO: 66 - DNA, 23 bp, Artificial Sequence
  Primer
ttggtatcagaaatacccctgtt

SEQ ID NO: 67 - DNA, 27 bp, Artificial Sequence
  Primer
caaacaacattaaaacatattcagtca

SEQ ID NO: 68 - DNA, 23 bp, Artificial Sequence
  Primer
cacatggtttgacatgtactttg

SEQ ID NO: 69 - DNA, 22 bp, Artificial Sequence
  Primer
tcattgaactattaggctggtt

SEQ ID NO: 70 - DNA, 21 bp, Artificial Sequence
  Primer
agcagaaccttcccaagagac

SEQ ID NO: 71 - DNA, 21 bp, Artificial Sequence
  Primer
tctgaacatggattgctgttg

SEQ ID NO: 72 - DNA, 21 bp, Artificial Sequence
  Primer
tgagcatgagcctttactgag

SEQ ID NO: 73 - DNA, 20 bp, Artificial Sequence
  Primer
tagttatttaaatggcccca

SEQ ID NO: 74 - DNA, 20 bp, Artificial Sequence
  Primer
caccctcctgagacattggt

SEQ ID NO: 75 - DNA, 22 bp, Artificial Sequence
  Primer
catcttctgcatgtttaaatga

SEQ ID NO: 76 - DNA, 23 bp, Artificial Sequence
  Primer
gtaattagcacatccgtcactgc

SEQ ID NO: 77 - DNA, 21 bp, Artificial Sequence
  Primer
ggagtttgcccgatgtttacc

SEQ ID NO: 78 - DNA, 22 bp, Artificial Sequence
  Primer
actttctgtttaatgtgcaggc

SEQ ID NO: 79 - DNA, 20 bp, Artificial Sequence
  Primer
caccttggatgcttacctgc

SEQ ID NO: 80 - DNA, 20 bp, Artificial Sequence
  Primer
tgactgtagctgtgggactc

SEQ ID NO: 81 - DNA, 20 bp, Artificial Sequence
  Primer
gtgtcacttcgcccttgatc

SEQ ID NO: 82 - DNA, 21 bp, Artificial Sequence
  Primer
gacttcaatggtcccagtagc

SEQ ID NO: 83 - DNA, 20 bp, Artificial Sequence
  Primer
ttcctccaccccagtaacac

SEQ ID NO: 84 - DNA, 20 bp, Artificial Sequence
  Primer
aaccccagcagtctcctaac

SEQ ID NO: 85 - DNA, 20 bp, Artificial Sequence
  Primer
gggacagctactcctaggac

SEQ ID NO: 86 - DNA, 24 bp, Artificial Sequence
  Primer
cctcataaggtggctgtgatgatg

SEQ ID NO: 87 - DNA, 22 bp, Artificial Sequence
  Primer
catctgccttggagcttcctct

SEQ ID NO: 88 - DNA, 20 bp, Artificial Sequence
  Primer
tgggttgtggtcagtccttg

SEQ ID NO: 89 - DNA, 20 bp, Artificial Sequence
  Primer
tgctctcccaaacacacctc

SEQ ID NO: 90 - DNA, 20 bp, Artificial Sequence
  Primer
ctcccaaaggtgccacatac

SEQ ID NO: 91 - DNA, 20 bp, Artificial Sequence
  Primer
ctaggctgctatggctctgg

SEQ ID NO: 92 - DNA, 21 bp, Artificial Sequence
  Primer
cagtggcagatcatagcaagg

SEQ ID NO: 93 - DNA, 20 bp, Artificial Sequence
  Primer
agccattcattgtgcaaagc

SEQ ID NO: 94 - DNA, 19 bp, Artificial Sequence
  Primer
gcagcaggacagggatcag

SEQ ID NO: 95 - DNA, 18 bp, Artificial Sequence
  Primer
gttgacccagcttttccg

SEQ ID NO: 96 - DNA, 21 bp, Artificial Sequence
  Primer
ctcatgtgatctatgcccgtc

SEQ ID NO: 97 - DNA, 25 bp, Artificial Sequence
  Primer
actacaatactcggttttagcagtc

SEQ ID NO: 98 - DNA, 22 bp, Artificial Sequence
  Primer
gttgtgcgccatatttcctgag

SEQ ID NO: 99 - DNA, 18 bp, Artificial Sequence
  Primer
cgatcttgctgcgcgttc

SEQ ID NO: 100 - DNA, 20 bp, Artificial Sequence
  Primer
cttcttcatggtgtgcggag

SEQ ID NO: 101 - DNA, 20 bp, Artificial Sequence
  Primer
gccgctccttcagtttcttg

SEQ ID NO: 102 - DNA, 24 bp, Artificial Sequence
  Primer
gttacaacaccagtgaatttctcc

SEQ ID NO: 103 - DNA, 20 bp, Artificial Sequence
  Primer
ttttccgctcatccaaaccc

SEQ ID NO: 104 - DNA, 21 bp, Artificial Sequence
  Primer
cagaagacaccatccacactc

SEQ ID NO: 105 - DNA, 25 bp, Artificial Sequence
  Primer
tctgttctcatctctggtattagtg

SEQ ID NO: 106 - DNA, 20 bp, Artificial Sequence
  Primer
tgttcctcccactacccttg

SEQ ID NO: 107 - DNA, 25 bp, Artificial Sequence
  Primer
actccagttatcttctaatagcagc

SEQ ID NO: 108 - DNA, 20 bp, Artificial Sequence
  Primer
gacctcccttgccaacttac

SEQ ID NO: 109 - DNA, 27 bp, Artificial Sequence
  Primer
agattctgtagtagtcatctctatagc

1. A method for the diagnosis of a genetic disposition to pulmonary arterial hypertension (PAH) and/or chronic thromboembolic pulmonary hypertension (CTEPH) wherein said method comprises the use of a gene panel or combination of genes comprising at least the genes with the nucleotide sequence of SEQ ID NOs: 1 to 14.

2. The method of claim 1, wherein the gene panel or combination of genes comprises the at least 14 genes with the nucleotide sequence of SEQ ID NOs: 1 to 14 and up to 50 genes comprising genes with the nucleotide sequence of SEQ ID NOs: 1 to 43.

3. The method of claim 1, wherein the gene panel or combination of genes comprises at least the genes with the nucleotide sequence of SEQ ID NOs: 1 to 36.

4. The use method according to claim 1, wherein the gene panel or combination of genes comprises at least the genes with the nucleotide sequence of SEQ ID NOs: 1 to 14 and 42.

5. The method according to claim 1, comprising the diagnosis of a genetic disposition to pulmonary veno-occlusive disease (PVOD) and/or hereditary haemorrhagic telangiectasia (HHT).

6. The method according to claim 1, comprising sequencing exons and exon-intron boundaries of the genes and determining whether at least one mutation in terms of one or more altered base pairs, smaller and larger deletions or insertions in the genes is present.

7. The method according to claim 1, comprising simultaneous testing of at least two patient samples.

8. The method according to claim 1, comprising:
diagnostic genetic testing in PAH/CTEPH/PVOD/HHT patients and/or their family members;
screening of newborns; and/or
pre-implantation diagnostics.

9. A method for the diagnosis of genetic defects in pulmonary arterial hypertension (PAH) and/or chronic thromboembolic pulmonary hypertension (CTEPH), comprising the following steps:
(a) providing at least one sample,
(b) extracting the genomic DNA from said sample(s),
(c) determining whether at least one mutation in terms of one or more altered base pairs, smaller and larger deletions or insertions in the genes with the nucleotide sequence of SEQ ID NOs: 1 to 14 is present,
wherein the presence of said at least one such mutation is a genetic confirmation of existing PAH or indicative for the increased probability for PAH/CTEPH to manifest in not yet affected relatives of PAH/CTEPH patients, and
(d) optionally, determining whether detected mutations/gene variants have pathological consequences either predicted with in silico prediction programmes and/or functional studies
wherein the sample(s) is/are patient sample(s) or sample(s) from a relative of a PAH/CTEPH patient.

10. The method of claim 9, wherein in step (c) the presence of at least one mutation in terms of one or more altered base pairs, smaller and larger deletions or insertions in the genes with the nucleotide sequence of SEQ ID NOs: 1 to 36 is determined.

11. The method of claim 9, wherein in step (c) the presence of at least one mutation in terms of one or more altered base pairs, smaller and larger deletions or insertions in the genes with the nucleotide sequence of SEQ ID NOs: 1 to 14 and 42 is determined.

12. The method of claim 9, wherein the diagnosis of genetic defects in pulmonary arterial hypertension comprises the diagnosis for pulmonary veno-occlusive disease (PVOD) and/or hereditary haemorrhagic telangiectasia (HHT).

13. The method of claim 9, wherein the presence of at least two mutations is indicative for the existence of PAH/CTEPH/PVOD/HHT or the increased probability for PAH/CTEPH/PVOD/HHT to become manifest.

14. The method of claim 9, wherein the sample is whole blood, peripheral blood or tissue, and/or wherein at least two samples are tested simultaneously.

15. The method of claim 9, wherein the method is used for
diagnostic genetic testing in PAH/CTEPH/PVOD/HHT patients and/or their family members;
screening of newborns; and/or
pre-implantation diagnostics.

16. The method of claim 9, comprising the further step of
(d) carrying out an additional sequencing,
or
multiplex ligation-dependent probe amplification or quantitative polymerase chain reaction.

17. A kit for the diagnosis of genetic defects in pulmonary arterial hypertension (PAH) and/or chronic thromboembolic pulmonary hypertension (CTEPH), comprising:
(i) means for carrying out next generation sequencing and detecting at least one mutation in terms of one or more altered base pairs, smaller and larger deletions or insertions in the genes with the nucleotide sequence of SEQ ID NOs: 1 to 14,
(ii) optionally, means for processing genomic DNA,
(iii) optionally, means for carrying out Sanger sequencing, or multiplex ligation-dependent probe amplification or quantitative polymerase chain reaction.

18. kit of claim 17, comprising means for carrying out next generation sequencing and detecting at least one mutation in terms of one or more altered base pairs, smaller and larger deletions or insertions in the genes with the nucleotide sequence of SEQ ID NOs: 1 to 36.

19. The kit of claim 17 or 18, comprising means for carrying out next generation sequencing and detecting at least one mutation in terms of one or more altered base pairs, smaller and larger deletions or insertions in the genes with the nucleotide sequence of SEQ ID NOs: 1 to 14 and 42.

20. The kit of claim 17, wherein the diagnosis of genetic defects in pulmonary arterial hypertension comprises the diagnosis for pulmonary veno-occlusive disease (PVOD) and/or hereditary haemorrhagic telangiectasia (HHT).
